United States Patent Application Publication US 2010/0190656 A1 - sequence listing, part 4

SEQ ID NO: 2967 - DNA, 8081 bp, Homo sapiens
gtctaaaactctcttttctcttggctcttcttattcgagtgatgaggaggaggagttgcataattcacggcccttccacagtaccttccacaataccagtgctaatctgactgagagtataacagaagagaactataatttcctgccacatagcccctccaagaaagattctgaatggaagagtggaacaaaagtcagtcgtacattcagctacatcaagaataaaatgtctagcagcaagaagagcaaagaaaaggaaaaagaaaaagataagattaaggagaaggagaaagattctaaagacaaggagaaagataagaagactgtcaacgggcacactttcagttccattcctgttgtgggtcccatcagctgtagccagtgtatgaagcccttcaccaacaaagatgcctatacttgtgcaaattgcagtgcttttgtccacaaaggctgccgagaaagtctagcctcctgtgcaaaggtcaaaatgaagcagcccaaagggagccttcaggcacatgacacatcatcactgcccacggtcattatgagaaacaagccctcacagcccaaggagcgtcctcggtccgcagtcctcctggtggatgaaaccgctaccaccccaatatttgccaatagacgatcccagcagagtgtctcgctctccaaaagtgtctccatacagaacattactggagttggcaatgatgagaacatgtcaaacacctggaaattcctgtctcattcaacagactcactaaataaaatcagcaaggtcaatgagtcaacagaatcacttactgatgagggagtaggtacagacatgaatgaaggacaactactgggagactttgagattgagtccaaacagctggaagcagagtcttggagtcggataatagacagcaagtttctaaaacagcaaaagaaagatgtggtcaaacggcaagaagtaatatatgagttgatgcagacagagtttcatcatgtccgcactctcaagatcatgagtggtgtgtacagccaggggatgatggcggatctgctttttgagcagcagatggtagaaaagctgttcccctgtttggatgagctgatcagtatccatagccaattcttccagaggattctggagcggaagaaggagtctctggtggataaaagtgaaaagaactttctcatcaagaggataggggatgtgcttgtaaatcagttttcaggtgagaatgcagaacgtttaaagaagacatatggcaagttttgtgggcaacataaccagtctgtaaactacttcaaagacctttatgccaaggataagcgttttcaagcctttgtaaagaagaagatgagcagttcagttgttagaaggcttggaattccagagtgcatattgcttgtaactcagcggattaccaagtacccagttttattccaaagaatattgcagtgtaccaaagacaatgaagtggagcaggaagatctagcacagtccttgagcctggtgaaggatgtgattggagctgtagacagcaaagtggcaagttatgaaaagaaagtgcgtctcaatgagatttatacaaagacagatagcaagtcaatcatgaggatgaagagtggtcagatgtttgccaaggaagatttgaaacggaagaagcttgtacgtgatgggagtgtgtttctgaagaatgcagcaggaaggttgaaagaggttcaagcagttcttctcactgacattttagttttccttcaagaaaaagaccagaagtacatctttgcatcattggaccagaagtcaacagtgatctctttaaagaagctgattgtgagagaagtggcacatgaggagaaaggtttattcctgatcagcatggggatgacagatccagagatggtagaagtccatgccagctccaaagaggaacgaaacagctggattcagatcattcaggacacaatcaacaccctgaacagagatgaagatgaaggaattcctagtgagaatgaggaagaaaagaaaatgttggacaccagagcccgagaattaaaagaacaacttcaccagaaggaccaaaaaatcctactcttgttggaagagaaggagatgattttccgggacatggctgagtgcagcacccctctcccagaggattgctccccaacacatagccctagagttctcttccgctccaacacagaagaggctctcaaaggaggacctttaatgaaaagtgcaataaatgaggtggagatccttcagggtttggtgagtggaaatctgggaggcacacttgggccgactgtcagcagccccattgagcaagatgtggtcggtcccgtttccctgccccggagagcagagacctttggaggatttgacagccatcagatgaatgcttcaaaaggaggcgagaaggaagagggagatgatggccaagatcttaggagaacggaatcagatagtggcctaaaaaagggtggaaatgctaacctggtatttatgcttaaaagaaacagtgagcaggttgtccagagcgttgttcatctctacgagctcctcagcgctctgcagggtgtggtgctgcagcaggacagctacattgaggaccagaaactggtgctgagcgagagggcgctcactcgcagcttgtcccgcccgagctccctcattgagcaggagaagcagcgcagcctggagaagcagcgccaggacctggccaacctgcagaagcagcaggcccagtacctcgaggagaagcgcaggcgcgagcgtgagtgggaagctcgtgagagggagctgcgggagcgggaggccctcctggcccagcgcgaggaggaggtgcagcaggggcagcaggacctggaaaaggagcgggaggagctccagcagaagaagggcacataccagtatgacctggagcgactgcgtgctgcccagaaacagcttgagagggaacaggagcagctgcgccgggaggcagagcggctcagccagcggcagacagaacgggacctgtgtcaggtttcccatccacataccaagctgatgaggatcccatcgttcttccccagtcctgaggagcccccctcgccatctgcaccttccatagccaaatcagggtcattggactcagaactttcagtgtccccaaaaaggaacagcatctctcggacacacaaagataaggggccttttcacatactgagttcaaccagccagacaaacaaaggaccagaagggcagagccaggcccctgcgtccacctctgcctctacccgcctgtttgggttaacaaagccaaaggaaaagaaggagaaaaaaaagaagaacaaaaccagccgctctcagcccggtgatggtcccgcgtcagaagtatcagcagagggtgaagagatcttctgctgaccctcttcctctctgctgaggcagctgcctcctgatcctggccagcccacctctcctgctgtccccgcgtgcacaagtctcttacactggacgcccactgctcctcagcgtccagtcctcctgggcggccccaggtcctggacaataagcaacagatgatattgagtgtcgggtggggaaggaggcccagactctgcttcggccatgatttgtgactgcccaggactctcaggttgggctggccctactcaggattacactgaaagtaatggcctcgtaagtacaggtgatggttttggacacgtcaggaattcctaaaggctgaaagagtgtatccaagtaaggtctgaacctccgaatgccttttatttgggggaacacaaaaccaaacagcagatgttttggacttgatctgtgtacgtacatggggacctgtctgcatatacacacggggaatgccagaagaaggcccagtctgcaccaggcgtctggtcaacttagcacaagggcagtgcctggacggacccggagcccccgcatatcagcagttcacccagtactcctcagagactggtttccctctaaacccatcccgggcacataccacccgtgttttgcatgtatttctcatttcattttagggatgacaaacatttgtgaaaccagtgagagaaggcttgatgtgtataaaagacgtgatgtgcaccacctcgatctcggtgtttcaggcactaaagcaacaaaacaacccatagtatctcattctgtcatcagatccagaagaaatatcctggttttccagcatgtttacccacatgttttggccatggataaagtgaagaggcctactcaccattatccctgcagcgtgacaccttttgattgtcactgaccactcagaaggggccacggcctcctggctgtgttcctgagcccccgtcgtgcctctcccagacagcagctgtctggcccttgctgggtgagggcacaccactgccaggggtcagcctcgcacccaggccaggcagaagctgtgctctgaagctaggacagctggctgagaagtgggttcaggcgaagggtgaagccatgtgtagcagttcctgccagtgcagatctggagaggagctggcccggaaggcgtggttgtgaaagcgcccttcttatgttaggaggccttggcaaaattggatttcttcaaaaatacatgtaaaggtctgttgttgaattgtactctgcccctggaagcagatacagatggctgcctgctgctcggctttgcttttgcttttcccaccgtgttttcatctttgttcacttgaggctttccccagctggtgtgtgcaggacagttcatggtaatgttgccctctgaggccccgtacaccagaagggaggccctggaaaattttgtgcttccaacgtggccttcaattcttgcttttttgcccctcggaagcatggggcttttgagcacacttaaaaaaagaaaaatctgtaacttggtgcttattgatgaattgcaagctggccttgcagatggagatatttatctttcagtttatttgaaagaggtctggtttaaaatttgtagcctacatttgttttatttattgtatttgtgtgtttgtgtttgtttttttttaagggtgagccaggtctagcccaacagtctaaactatccagtcaataccgagtgaagtggcagccagcactgttcactctgtgtcttttgaagtgccttgaaggcccagatgaaattttaaagggagggggtccatgtccttccctcccccaccccgcctcattctttaatcaaaggatgtcttctcccttgtttgagaatgaagaaactcgccacctctgacctacctttgcctttttctgtcatggagaatactcacccttcagaaacagaccaaaggccaaaacctgctgatttttctattgaaaatatgtccccttgcaaagaccctaaacaaaaagttaagtttctttctttcacctatttgtacaactccaagttacagctgaatctgtcgtgactttcctgagatctacccggggcttggctgtctgttctgggcactggctccgagttcccctcctgggatttgcaggagggcagtactgaacctgcattcttctccttgtaaatgtaggccgggtgcccctgttctccgggtttggaacaatacgaggttggtgctgatgggatttacttgcgtacgtgctcttcacaaaaacaccgtggatgctgaagttagagcacgtcgccacagagcttgacatcaatgttagagggtctcttactccccgcccagctgtgatgtttcatctgctttggttgttttggtggtcttttttaaaaatagagatttcacatctgcccagaccccactcaaaacgatttggtcaggttctggttggacaagtttaaaatcaaagtagtgcccggaattccctcaaaccacccaacttcatccaggaatacagtctgcagtgcagcaacagaaccgcttaccaagaactgtgcttacatacctttgtcatctctcttccccccttggaagttgtcctcagggggatttgttcctgtcctggggatttacctgggatggtggctgcctgtgcttttgctcatggccttgacagtgctctagttgctggatctaatggcctgtcttggtttctatcacatgagaaggggttgtttttttggggtgactcggactgaattccccatactgtttccacgccgggacaccatgttctccatcaagctaaagaaatcacgtgcctgaaactgtgcttaagttttgggggaaagatggagttcctatccagagcccccagatttccagaatcgagtgagcttcctggaaggagactgcgtcttctctcaattccagtcatctcagtcgttgtcgttaggtgacatgtgcactttaaatgctctcatcggttggcttcattttcaagacaatcaaatgtattgactgtgttttcttcttagaaaatggagagggttaaaaacatgcaaactgccactttcaacctttgccagtattccctctacccccgtgagagctatctggggggaagaatccttaccaaggtttttttggaaaggtacgaatcttaacttttttccccttctgtgtctcagggtaatactattcagagtcgcccctttgctcattttctcccgtatttgttaccttcctgaggcctcagtattagtcgtgagcacaaagttttgagacctttggcgttgtttcttgatgtgggaggggaggtgttagtgcatgcaagggttgaactagatagaccctgccttagtagagggtgggactataaccttagaggccagaacttgatccagaagttgctgtccacagaagtgctttctatttcatcatttttgtttctagggctctttttctgtagccaggtcttcccaaggattttagtatttgcattggagttgaggtttactctaatgatggtggcccagctgtgcccagaggacagccaggcaggccctgggagggagtttagaaagacagtcctggtgaatgggcttcaagtggtcacaaagagggtggctgtgaggtgaccccagacactgcagaacgatgtgcaccctctgcgttttggatgtccttggaatgtgggagcctagaaataaccctgtggatggaattggggcagcggctgctggagatctgtgtgccttgccttccttcagcaggaccgtctaggtgcgcagccacctatggatgcgtcccagccagccccgtcgctctcgtccatcctcagagacaaagaagagggcagggagtttgggcttggttttgaactttcctttcaatgtagcaaagcattcctagttaaccagagccttggaatctactgcctgctggccaggctttaaaatgaaaagtgttttaatgctgccataaaagggaggcgggggggaggaagggaaaataaaggcatctttccaagtactcatctaatttaattgtcaaaagattgataggccatgaattacttctccatctcactaagggttaaaggcgtgcaaccccccactggctgtgtcccctgccaccgaagtgagtgacctgccctacaaccaggtgggaccacctgtgctgcagtccggaggggcttctgcaggaagcactcaccccccacaccttccccggcctgagcttcccctacctttcgtcaccacctgagggcatgagcacaggccatggggcgtgcctggtgagtctgcctgtggttcaggcttagcctgtggtctcctgtgtgctgctgcccgcatgggatgcgcaggggaggcgtggggatccgcaggagggtggttgggatacaccggatacctctgctctcattgcttgtttgcaaatgctctatggacatttgtgtgctaaatcctattaaataaaaaagacgggttaaaacccagatgctgtatattcatttgtaattatgtataaagtgaagcagttttaaactgtaaagatttttttcagtgtgttttctcgaattttgccacaacatactggcttcgtattttatttatctttctttctagttaccagcttcagacccttgtaaagtctccctcagccctttcaaaaaataataaatttcctgtgaagtt

SEQ ID NO: 2968 - DNA, 3319 bp, Homo sapiens
agcggagctgcagccggagaaagaggaagagggagagagagcgcgccagggcgagggcaccgccgccggtcgggcgcgctgggcctgcccggaatcccgccgcctgcgccccgcgccccgcgccctgcgggccatgggagccggccgccggcagggacgacgcctgtgagacccgcgagcggcctcggggaccatggggagcgatcgggcccgcaagggcggagggggcccgaaggacttcggcgcgggactcaagtacaactcccggcacgagaaagtgaatggcttggaggaaggcgtggagttcctgccagtcaacaacgtcaagaaggtggaaaagcatggcccggggcgctgggtggtgctggcagccgtgctgatcggcctcctcttggtcttgctggggatcggcttcctggtgtggcatttgcagtaccgggacgtgcgtgtccagaaggtcttcaatggctacatgaggatcacaaatgagaattttgtggatgcctacgagaactccaactccactgagtttgtaagcctggccagcaaggtgaaggacgcgctgaagctgctgtacagcggagtcccattcctgggcccctaccacaaggagtcggctgtgacggccttcagcgagggcagcgtcatcgcctactactggtctgagttcagcatcccgcagcacctggtggaggaggccgagcgcgtcatggccgaggagcgcgtagtcatgctgcccccgcgggcgcgctccctgaagtcctttgtggtcacctcagtggtggctttccccacggactccaaaacagtacagaggacccaggacaacagctgcagctttggcctgcacgcccgcggtgtggagctgatgcgcttcaccacgcccggcttccctgacagcccctaccccgctcatgcccgctgccagtgggccctgcggggggacgccgactcagtgctgagcctcaccttccgcagctttgaccttgcgtcctgcgacgagcgcggcagcgacctggtgacggtgtacaacaccctgagccccatggagccccacgccctggtgcagttgtgtggcacctaccctccctcctacaacctgaccttccactcctcccagaacgtcctgctcatcacactgataaccaacactgagcggcggcatcccggctttgaggccaccttcttccagctgcctaggatgagcagctgtggaggccgcttacgtaaagcccaggggacattcaacagcccctactacccaggccactacccacccaacattgactgcacatggaacattgaggtgcccaacaaccagcatgtgaaggtgcgcttcaaattcttctacctgctggagcccggcgtgcctgcgggcacctgccccaaggactacgtggagatcaacggggagaaatactgcggagagaggtcccagttcgtcgtcaccagcaacagcaacaagatcacagttcgcttccactcagatcagtcctacaccgacaccggcttcttagctgaatacctctcctacgactccagtgacccatgcccggggcagttcacgtgccgcacggggcggtgtatccggaaggagctgcgctgtgatggctgggccgactgcaccgaccacagcgatgagctcaactgcagttgcgacgccggccaccagttcacgtgcaagaacaagttctgcaagcccctcttctgggtctgcgacagtgtgaacgactgcggagacaacagcgacgagcaggggtgcagttgtccggcccagaccttcaggtgttccaatgggaagtgcctctcgaaaagccagcagtgcaatgggaaggacgactgtggggacgggtccgacgaggcctcctgccccaaggtgaacgtcgtcacttgtaccaaacacacctaccgctgcctcaatgggctctgcttgagcaagggcaaccctgagtgtgacgggaaggaggactgtagcgacggctcagatgagaaggactgcgactgtgggctgcggtcattcacgagacaggctcgtgttgttgggggcacggatgcggatgagggcgagtggccctggcaggtaagcctgcatgctctgggccagggccacatctgcggtgcttccctcatctctcccaactggctggtctctgccgcacactgctacatcgatgacagaggattcaggtactcagaccccacgcagtggacggccttcctgggcttgcacgaccagagccagcgcagcgcccctggggtgcaggagcgcaggctcaagcgcatcatctcccaccccttcttcaatgacttcaccttcgactatgacatcgcgctgctggagctggagaaaccggcagagtacagctccatggtgcggcccatctgcctgccggacgcctcccatgtcttccctgccggcaaggccatctgggtcacgggctggggacacacccagtatggaggcactggcgcgctgatcctgcaaaagggtgagatccgcgtcatcaaccagaccacctgcgagaacctcctgccgcagcagatcacgccgcgcatgatgtgcgtgggcttcctcagcggcggcgtggactcctgccagggtgattccgggggacccctgtccagcgtggaggcggatgggcggatcttccaggccggtgtggtgagctggggagacggctgcgctcagaggaacaagccaggcgtgtacacaaggctccctctgtttcgggactggatcaaagagaacactggggtataggggccggggccacccaaatgtgtacacctgcggggccacccatcgtccaccccagtgtgcacgcctgcaggctggagactggaccgctgactgcaccagcgcccccagaacatacactgtgaactcaatctccagggctccaaatctgcctagaaaacctctcgcttcctcagcctccaaagtggagctgggaggtagaaggggaggacactggtggttctactgacccaactgggggcaaaggtttgaagacacagcctcccccgccagccccaagctgggccgaggcgcgtttgtgcatatctgcctcccctgtctctaaggagcagcgggaacggagcttcggggcctcctcagtgaaggtggtggggctgccggatctgggctgtggggcccttgggccacgctcttgaggaagcccaggctcggaggaccctggaaaacagacgggtctgagactgaaattgttttaccagctcccagggtggacttcagtgtgtgtatttgtgtaaatgagtaaaacattttatttctttttaaaaaaaaaaaaaaaaaaaa

SEQ ID NO: 2969 - DNA, 6327 bp, Homo sapiens
cggcggcggcgcgaccgagcatcctggcggcgccgggccactgggagagtttatgtggccgaggcagacaagtggaattaggccttgctgcaggggacttcatttccttctcagtactggacccatttatgaggaggtggcttatgaaagtgtgatgttcgcgtatttcttgacaggccacagcaaacacaggtgtgcaggaaccgtttgtcatggaagccagggagcctggggggcccacacccacctaccatcttgtccctaacaccagccagtcccaggtggaagaagatgtcagctcgccacctcaaaggtcctccgaaactatgcagctgaagaaggagatctccctgctgaatggggtcagcctggtggtgggcaacatgatcggctcagggatctttgtctcacccaagggtgtgctggtacacactgcctcctatgggatgtcactgattgtgtgggccattggtgggctcttctctgttgtgggtgccctttgttatgcagagctggggaccaccatcaccaagtcgggagccagctacgcttatattctagaggcctttgggggcttcattgccttcatccgcctgtgggtctcactgctagttgttgagcccaccggtcaggccatcatcgccatcacctttgccaactacatcatccagccgtccttccccagctgtgatcccccatacctggcctgccgtctcctggctgctgcttgcatatgtctgctgacatttgtgaactgtgcctatgtcaagtggggcacacgtgtgcaggacacgttcacttacgccaaggtcgtagcgctcattgccatcattgtcatgggccttgttaaactgtgccagggacactctgagcactttcaggacgcctttgagggttcctcctgggacatgggaaacctctctcttgccctctactctgccctcttctcttactcaggttgggacacccttaattttgtaacagaagaaatcaaaaacccagaaagaaatttgcccttggccattgggatttctatgccaattgtgacgctcatctacatcctgaccaatgtggcctattacacagtgctgaacatttcagatgtccttagcagtgatgctgtggctgtgacatttgctgaccagacgtttggcatgttcagctggaccatccccattgctgttgccctgtcctgctttgggggcctcaatgcatccatctttgcttcatcaaggttgttcttcgtgggctcccgggagggccacctaccggaccttctgtccatgatccacattgagcgttttacacctatccctgctttactgttcaattgcaccatggcactcatctacctcatcgtggaggatgttttccggcttatcaactacttcagcttcagctactggttcttcgtgggcctgtctgttgttggacagctctacctccgctggaaggagcccaagcggccccggcctctcaagctgagcgtgtttttccccatcgtgttctgcatatgctccgtgtttctggtgatagtgcccctcttcactgacaccattaattccctcattggcatcgggattgccctttctggagtccctttctacttcatgggtgtttacctgccagagtcccggaggccattgtttattcggaatgtcctggctgctatcaccagaggcacccagcagctttgcttttgtgtcctgactgagcttgatgtagccgaagaaaaaaaggatgagaggaaaactgactagaggtcagaggtggctttctgaggcctggaaggcaggccaaccagcaaaatcctgataacaagactctgtgggcccaactctcctgaattaaaggagccttttgacccaatcatatagtggggctcagggccagtgctcactcttattggtaagctataggagactcaggatctgggccaacctcaaggtgggggcttcagagggtggggggaagattggggaacggggggaatggtcatttagttttactcctgataggtagatgcagctcttacagatatttacttggtaaagtgcagtggggaagagggaatgctaggttgatagggctggtggcctctgaatttggtatttgaactaggagtccctatagaggggctgctttatgggaagtttttctctgaccaggtacaacacctgactttaaaggcctgaaatgctaccatttcttcctctggctcaaaattcttccctggggagagagttatattcccttatttattgatatttagtccagaacaccagttctaacgaagcatgcgtgtctcttcatctacaggatgcaataggctgattgtatttaaaaatcaaagtacccaaaactgagtccctttgggctcagaaatgtctgtggtattgggtcagactctgaccacagattttatgctgtttagcacaatttctattgagtcttacctgcaacaatgaaccttaaagatttttttactcacgtacctgttacactttagcatacagatagatcatagatcacgttacaagcacttggctcaggtccagcaaggacagatgaacaaattcctgagtcagaagtctgttaatattgctgttttgaaggacaatcctttattttacttgagaccttacatctttgttctagctgacagtaaatctctgggtttctgttacgaactctaagagggctgaaacttctgatattcaggtggatcacctgaattctctcagctgtcaatggcttggagaacatctcatgggcccaagtcatcaaataacctgttcctctctgtaagggcagtgtgagggactgctgtgcagacccaagcaatcccaacctggtgctaggtcatttcacttttctgaaaacctcacatcaggctgcatcctcttctgtccctggcaccaggctttgtttacacttggagccaccttggtgtgggtcaccgggacagtgtactcctctcctgccagcctccccttccccgaggtgtggtggctgcagtctctggaagagcttggtacttgtggggacttctgttttctccctgtggagatcagtgaagactgggaggaaagctgcttcaacctgagtccggctcttcagcaggctgcacaagtggaagcaactaattctggtgctcaggctgggctctccacccaagttaggcctgctctggcctaatggatcttactgtatgagcaggacggctgcattggattgtacaactgttttgtgatgcccccagacactgtcatcctaggccgagaagaacctgctagcttgacataccccatgggcttatccttaggttttggaattggtcaacagtgaggcagtctcccttcctgaccattcttctccacccagtcacagataagggaataaccttggccatatatttgctcaataaagattgaaggaagcatggtcatagttgccctgggttcagagcataatgcatatgtgaagcatggggtgacattcctactgtcatgggtttgggatttgtaacggcaaattcctgcccgacgacagggtgtcttatgcaaaggctgacttgcctgaacgctaagaacatgacttctgtctgagctaagctggcacccatcccagggctcctctggagctaatcctttaagcaaaatgtgcttgccttttaaagatccctgaccccagctttagctttctccaccagataaccagctaatcccaggaatttgctgccccccaccagtggcttctagggaaagcaaggacctcacatgccaggtgccctagtacttgcttagtgagccatgtcatcctcctttcatttttggatggtgacagcatttttcccctctgtgctggatacagacttctcccaggatcctctctttgggagcgaagccagaggatccctacagcactcaagcttcatggtggaattaatttctgccagctctttgttgtctgtctccttaaatccttttcctggtgtgcttattatcccttttgcagtgagtacagtttattaagttgtcagccctttaatattggggaaacttaatgagtataaatagcagggagcacattgtaacagcacagtgttttgtttttttcacccggttgctgtatgagaatggctttcaatcctttgtttctatgcctacagacagaaagcaagatgtctaatattagacatacaagttgctgcctgttataacggtgaattatacctttgtgcatgcctaggatgtttgttgttttaattagctgcaatatatacggcctgtgtacacagaatttaatcactgcggcaggttgaacaactccatgtagataagagcaagtgtaggcaaaggtttagaaaatggacataaagtcaaagaatgatggcaggtaggatgaaggagagatacttaggaaatcctaaaagaggcggcaagaaggtacctccctgtgtaactcaccttcccccatgacagtgagtaagagacactcacaggctatgagggtacacccctagctgaatgttctgtgttgtttccttagacctgtggtgtccgctgcaacagctactagccacgtgtagctaattacattaaaatgaaataaaattaaaagctcagtttctcagttgcgctaatcacatttcaagtgctcagcagccacccgtgtctactactacacagtgcagacacagaacatatcatcactgcagatagttctactggacaatgttacgctagaataaacaccaaggcagtcagttaaggcagctatggtttggaaaggcatacggacagagtctgcttagaagagatacaagttgttaataaaattgatcctgttgatagtagtttgtttttgtggtgggtgctgtgaagagtaaacattactcagtggaaagctaagttcagaaggtactttgtttttcctcccttgccttaagtccttggtatttataatcaatgctgaaccttctatttcactaccgctccctgttttagatattcagatttaaaaggttttcaaagaattactttcttccatgttcaaagctagattttactaaacacatgtatcacattcatatatattgtttcttggccccactgccaaaggaagtcagtcagtaatttcacaaccgttatcagagtttggaagcagaaatagctgttaactaaaatctcccactgctcagactactttctgccctaatggccattactatccagtctgtattgctacaagggacccactggtaccccttttagattctatcaaaaggaacagggttttcctagaggcaggcagcctggtggtatggcacagcagaagcttactgctaatgaaatgggaacctcccccccccttgtggtttcagcacagaacctgaatgccaggaaaaattcctgggccaagaagctaaagctaaagaaaccttccttttttcaacgtttttttttctttcaaactgtagggtcacttttgattgaggcaaaggggtcctactgtaagtggaaaagactcactcccctaacataagttttcactgtggtgggatggtgccgcccgatatgcttgatatgcttttccttccacatgttaagctaggaaacctaacaggatgtcagcagggcagttaactctggactcagagccctcaagggcatgtggcagaacctcatggacatcacaagaccatcagtctgaatccaggtcgtgggggctgtcatagccgaactccttctgcacatccagagggtacttgctccacatccgctgtctgctgctgcctctttcctcctcactcaggctgttgtagtcagcagagcctagaatgacatcccgggagtggattctaaatgtgattttcctaggctactgcaggagccccttctcttctcagaaaggtctgtttttgttcccgattgtaatgcaaaatccttgctcaataaataaaaaagaatatagaattcttttttttttaaagaaggaatcactttcctatcatctaaaccaagttccttcacactggagtattttgtcacttctcccctccgtggagtattttgtcacttctcccctccgtataggattttttgttgttgtaagagttgtagtcatattgtaaatatttttgtacctttctccttttaacgtgttattgacaaacctccccaaaagaatatgcaattgtttgattcatttctctgttatcagacaccaataaattctttttgttgggaaaaaaaaaaaaaaaaaaaaaaaaaaaaaaaaaaaaaaaaaaaaaaaaaaaaaaaaagaaaaaaaaaaaaaaaaaaa

SEQ ID NO: 2970 - DNA, 3276 bp, Homo sapiens
atttccggcatgagccggaagaccgtcccggatggcctcggggactgccagtgtgtggaggtgagctccgggattgccggcattcccgcttctgctggttgcttcatgctgcaggctgcggccgtcagccctcgctcgcattggtggcgctgaggtgccggggcagcaagtgacatgtcgtcgggcctccgcgccgctgacttcccccgctggaagcgccacatctcggagcaactgaggcgccgggaccggctgcagagacaggcgttcgaggagatcatcctgcaataacaaattgctggaaaagtcagatcttcattcagtgttggcccagaaactacaggctgaaaagcatgacgtaccaaacaggcacgagataagtcccggacatgatggcacatggaatgacaatcagctacaagaaatggcccaactgaggattaagcaccaagaggaactgactgaattacacaagaaacgtggggagttagctcaactggtgattgacctgaataaccaaatgcagcggaaggacagggagatgcagatgaatgaagcaaaaattgcagaatgtttgcagactatctctgacctggagacggagtgcctagacctgcgcactaagctttgtgaccttgaaagagccaaccagaccctgaaggatgaatatgatgccctgcagatcacttttactgccttggagggaaaactgaggaaaactacggaagagaaccaggagctggtcaccagatggatggctgagaaagcccaggaagccaatcggcttaatgcagagaatgaaaaagactccaggaggcggcaagcccggctgcagaaagagcttgcagaagcagcaaaggaacctctaccagtcgaacaggatgatgacattgaggtcattgtggatgaaacttctgatcacacagaagagacctctcctgtgcgagccatcagcagagcagccacgagacgctctgtctcttccttcccagtcccccaggacaatgtggatactcatcctggttctggtaaagaagtgagggtaccagctactgccttgtgtgtcttcgatgcacatgatggggaagtcaacgctgtgcagttcagtccaggttcccggttactggccactggaggcatggaccgcagggttaagctttgggaagtatttggagaaaaatgtgagttcaagggttccctatctggcagtaatgcaggaattacaagcattgaatttgatagtgctggatcttacctcttagcagcttcaaatgattttgcaagccgaatctggactgtggatgattatcgattacggcacacactcacgggacacagtgggaaagtgctgtctgctaagttcctgctggacaatgcgcggattgtctcaggaagtcacgaccggactctcaaactctgggatctacgcagcaaagtctgcataaagacagtgtttgcaggatccagttgcaatgatattgtctgcacagagcaatgtgtaatgagtggacattttgacaagaaaattcgtttctgggacattcgatcagagagcatagttcgagagatggagctgttgggaaagattactgccctggacttaaacccagaaaggactgagctcctgagctgctcccgtgatgacttgctaaaagttattgatctccgaacaaatgctatcaagcagacattcagtgcacctgggttcaagtgcggctctgactggaccagagttgtcttcagccctgatggcagttacgtggcggcaggctctgctgagggctctctgtatatctggagtgtgctcacagggaaagtggaaaaggttctttcaaagcagcacagctcatccatcaatgcggtggcgtggtcgccctctggctcgcacgttgtcagtgtggacaaaggatgcaaagctgtgctgtgggcacagtactgacggggctctcagggctgggaggaccccagtgccctcctcagaagaagcacatgggctcctgcagccctgtcctggcaggtgatgtgctgggtatagcatggacctcccagagaagctcaagctatgtggcactgtagctttgccgtgaatgggatttctgaagatttgactgaggtctctcttggcctggaagaataacactgaaaaaacctgacgctgcggtcacttagcagaggctcaggttcttgccttgggaaacactactagctctgaccttccatacctcacttgggggagcacagggccccgctgggcctcctcaccaacggcagtgccaaaatcagcccccacatcaaggtggtgttctctgtgctttctctcgtccttccaaagtcggttctggcctaacgcatgtcccaacaccttgggttcatttgcccggtgaactcactttaagcattggattaacggaaactcccgaactacagacccctccctggtgggttgcatgaatgtgtctcattactgctgaaatgtcctcacatctctttcactgttcttcagagctttctggctctctttcccccacaaaattcgacatatttaaaaatctccgtgtggctttaaaaaatggttttttgtttttttgtttttttgaggtgggagaggatgtgtgaaaatcttttccagggaaatgggttcgctgcagaggtaaggatgtgttcctgtatcgatctgcagacacccagaaggtgggtgcacactgcatgcttgggggtgccaagggattcgagacctccaacatacttgtctgaaggtggtgattctggccatggcccctctgccaagcctgtgtgcgatgcccttggtgctttagtgcaagaagcctaggctcagaagcacagcagcgccatctttccgtttcaggggttgtgatgaaggccaaggaaaaacatttatctttactattttacctacgtataaagttttagttcattgggtgtgcgaaacaccctttttatcacttttaaatttgcactttattttttttcttccatgcttgttctctggacatttggggatgtgagtgttagagctggtgagagaggagtcaggtggccttcccaccgatggtcctggcctccacctgccctctcttccctgcctgatcaccgctttccaatttgcccttcagagaacttaagtcaaggagagttgaaattcacaggccagggcacatcttttatttatttcattatgttggccaacagaacttgattgtaaataataataaagaaatctgttatatacttttcaaaaaaaaaaaaaaaaaaaaa

SEQ ID NO: 2971 - DNA, 3333 bp, Homo sapiens
atttccggcatgagccggaagaccgtcccggatggcctcggggactgccagtgtgtggaggtgagctccgggattgccggcattcccgcttctgctggttgcttcatgctgcaggctgcggccgtcagccctcgctcgcattggtggcgctgaggtgccggggcagcaagtgacatgtcgtcgggcctccgcgccgctgacttcccccgctggaagcgccacatctcggagcaactgaggcgccgggaccggctgcagagacaggcgttcgaggagatcatcctgcaataacaaattgctggaaaagtcagatcttcattcagtgttggcccagaaactacaggctgaaaagcatgacgtaccaaacaggcacgagataagtcccggacatgatggcacatggaatgacaatcagctacaagaaatggcccaactgaggattaagcaccaagaggaactgactgaattacacaagaaacgtggggagttagctcaactggtgattgacctgaataaccaaatgcagcggaaggacagggagatgcagatgaatgaagcaaaaattgcagaatgtttgcagactatctctgacctggagacggagtgcctagacctgcgcactaagctttgtgaccttgaaagagccaaccagaccctgaaggatgaatatgatgccctgcagatcacttttactgccttggagggaaaactgaggaaaactacggaagagaaccaggagctggtcaccagatggatggctgagaaagcccaggaagccaatcggcttaatgcagagaatgaaaaagactccaggaggcggcaagcccggctgcagaaagagcttgcagaagcagcaaaggaacctctaccagtcgaacaggatgatgacattgaggtcattgtggatgaaacttctgatcacacagaagagacctctcctgtgcgagccatcagcagagcagccactaagcgactctcgcagcctgctggaggccttctggattctatcactaatatctttgggagacgctctgtctcttccttcccagtcccccaggacaatgtggatactcatcctggttctggtaaagaagtgagggtaccagctactgccttgtgtgtcttcgatgcacatgatggggaagtcaacgctgtgcagttcagtccaggttcccggttactggccactggaggcatggaccgcagggttaagctttgggaagtatttggagaaaaatgtgagttcaagggttccctatctggcagtaatgcaggaattacaagcattgaatttgatagtgctggatcttacctcttagcagcttcaaatgattttgcaagccgaatctggactgtggatgattatcgattacggcacacactcacgggacacagtgggaaagtgctgtctgctaagttcctgctggacaatgcgcggattgtctcaggaagtcacgaccggactctcaaactctgggatctacgcagcaaagtctgcataaagacagtgtttgcaggatccagttgcaatgatattgtctgcacagagcaatgtgtaatgagtggacattttgacaagaaaattcgtttctgggacattcgatcagagagcatagttcgagagatggagctgttgggaaagattactgccctggacttaaacccagaaaggactgagctcctgagctgctcccgtgatgacttgctaaaagttattgatctccgaacaaatgctatcaagcagacattcagtgcacctgggttcaagtgcggctctgactggaccagagttgtcttcagccctgatggcagttacgtggcggcaggctctgctgagggctctctgtatatctggagtgtgctcacagggaaagtggaaaaggttctttcaaagcagcacagctcatccatcaatgcggtggcgtggtcgccctctggctcgcacgttgtcagtgtggacaaaggatgcaaagctgtgctgtgggcacagtactgacggggctctcagggctgggaggaccccagtgccctcctcagaagaagcacatgggctcctgcagccctgtcctggcaggtgatgtgctgggtatagcatggacctcccagagaagctcaagctatgtggcactgtagctttgccgtgaatgggatttctgaagatttgactgaggtctctcttggcctggaagaataacactgaaaaaacctgacgctgcggtcacttagcagaggctcaggttcttgccttgggaaacactactagctctgaccttccatacctcacttgggggagcacagggccccgctgggcctcctcaccaacggcagtgccaaaatcagcccccacatcaaggtggtgttctctgtgctttctctcgtccttccaaagtcggttctggcctaacgcatgtcccaacaccttgggttcatttgcccggtgaactcactttaagcattggattaacggaaactcccgaactacagacccctccctggtgggttgcatgaatgtgtctcattactgctgaaatgtcctcacatctctttcactgttcttcagagctttctggctctctttcccccacaaaattcgacatatttaaaaatctccgtgtggctttaaaaaatggttttttgtttttttgtttttttgaggtgggagaggatgtgtgaaaatcttttccagggaaatgggttcgctgcagaggtaaggatgtgttcctgtatcgatctgcagacacccagaaggtgggtgcacactgcatgcttgggggtgccaagggattcgagacctccaacatacttgtctgaaggtggtgattctggccatggcccctctgccaagcctgtgtgcgatgcccttggtgctttagtgcaagaagcctaggctcagaagcacagcagcgccatctttccgtttcaggggttgtgatgaaggccaaggaaaaacatttatctttactattttacctacgtataaagttttagttcattgggtgtgcgaaacaccctttttatcacttttaaatttgcactttattttttttcttccatgcttgttctctggacatttggggatgtgagtgttagagctggtgagagaggagtcaggtggccttcccaccgatggtcctggcctccacctgccctctcttccctgcctgatcaccgctttccaatttgcccttcagagaacttaagtcaaggagagttgaaattcacaggccagggcacatcttttatttatttcattatgttggccaacagaacttgattgtaaataataataaagaaatctgttatatacttttcaaaaaaaaaaaaaaaaaaaaa

SEQ ID NO: 2972 - DNA, 2897 bp, Homo sapiens
atttccggcatgagccggaagaccgtcccggatggcctcggggactgccagtgtgtggaggtgagctccgggattgccggcattcccgcttctgctggttgcttcatgctgcaggctgcggccgtcagccctcgctcgcattggtggcgctgaggtgccggggcagcaagtgacatgtcgtcgggcctccgcgccgctgacttcccccgctggaagcgccacatctcggagcaactgaggcgccgggaccggctgcagagacaggcgttcgaggagatcatcctgcaataacaaattgctggaaaagtcagatcttcattcagtgttggcccagaaactacaggctgaaaagcatgacgtaccaaacaggcacgagataaggaggcggcaagcccggctgcagaaagagcttgcagaagcagcaaaggaacctctaccagtcgaacaggatgatgacattgaggtcattgtggatgaaacttctgatcacacagaagagacctctcctgtgcgagccatcagcagagcagccaccgactctcgcagcctgctggaggccttctggattctatcactaatatctttgggagacgctctgtctcttccttcccagtcccccaggacaatgtggatactcatcctggttctggtaaagaagtgagggtaccagctactgccttgtgtgtcttcgatgcacatgatggggaagtcaacgctgtgcagttcagtccaggttcccggttactggccactggaggcatggaccgcagggttaagctttgggaagtatttggagaaaaatgtgagttcaagggttccctatctggcagtaatgcaggaattacaagcattgaatttgatagtgctggatcttacctcttagcagcttcaaatgattttgcaagccgaatctggactgtggatgattatcgattacggcacacactcacgggacacagtgggaaagtgctgtctgctaagttcctgctggacaatgcgcggattgtctcaggaagtcacgaccggactctcaaactctgggatctacgcagcaaagtctgcataaagacagtgtttgcaggatccagttgcaatgatattgtctgcacagagcaatgtgtaatgagtggacattttgacaagaaaattcgtttctgggacattcgatcagagagcatagttcgagagatggagctgttgggaaagattactgccctggacttaaacccagaaaggactgagctcctgagctgctcccgtgatgacttgctaaaagttattgatctccgaacaaatgctatcaagcagacattcagtgcacctgggttcaagtgcggctctgactggaccagagttgtcttcagccctgatggcagttacgtggcggcaggctctgctgagggctctctgtatatctggagtgtgctcacagggaaagtggaaaaggttctttcaaagcagcacagctcatccatcaatgcggtggcgtggtcgccctctggctcgcacgttgtcagtgtggacaaaggatgcaaagctgtgctgtgggcacagtactgacggggctctcagggctgggaggaccccagtgccctcctcagaagaagcacatgggctcctgcagccctgtcctggcaggtgatgtgctgggtatagcatggacctcccagagaagctcaagctatgtggcactgtagctttgccgtgaatgggatttctgaagatttgactgaggtctctcttggcctggaagaataacactgaaaaaacctgacgctgcggtcacttagcagaggctcaggttcttgccttgggaaacactactagctctgaccttccatacctcacttgggggagcacagggccccgctgggcctcctcaccaacggcagtgccaaaatcagcccccacatcaaggtggtgttctctgtgctttctctcgtccttccaaagtcggttctggcctaacgcatgtcccaacaccttgggttcatttgcccggtgaactcactttaagcattggattaacggaaactcccgaactacagacccctccctggtgggttgcatgaatgtgtctcattactgctgaaatgtcctcacatctctttcactgttcttcagagctttctggctctctttcccccacaaaattcgacatatttaaaaatctccgtgtggctttaaaaaatggttttttgtttttttgtttttttgaggtgggagaggatgtgtgaaaatcttttccagggaaatgggttcgctgcagaggtaaggatgtgttcctgtatcgatctgcagacacccagaaggtgggtgcacactgcatgcttgggggtgccaagggattcgagacctccaacatacttgtctgaaggtggtgattctggccatggcccctctgccaagcctgtgtgcgatgcccttggtgctttagtgcaagaagcctaggctcagaagcacagcagcgccatctttccgtttcaggggttgtgatgaaggccaaggaaaaacatttatctttactattttacctacgtataaagttttagttcattgggtgtgcgaaacaccctttttatcacttttaaatttgcactttattttttttcttccatgcttgttctctggacatttggggatgtgagtgttagagctggtgagagaggagtcaggtggccttcccaccgatggtcctggcctccacctgccctctcttccctgcctgatcaccgctttccaatttgcccttcagagaacttaagtcaaggagagttgaaattcacaggccagggcacatcttttatttatttcattatgttggccaacagaacttgattgtaaataataataaagaaatctgttatatacttttcaaaaaaaaaaaaaaaaaaaaa

SEQ ID NO: 2973 - DNA, 1855 bp, Homo sapiens
gccggaagcgcggatcacacgggcccctacaaggggcccctacaagcggccacaaggatggcaggcttcgcggagctcgggctgtcatcgtggctcgtggaacaatgtcggcagctgggtttgaagcagcccacgcccgtgcagctcggctgcatccccgccatcctggagggtcgagactgcttgggctgtgctaagacaggcagtgggaagacagcagcgtttgtccttcccatcttgcagaagctgtctgaggatccctatggcatcttctgcctcgtcctgacacccaccagggagctggcctaccagatcgcagagcagttccgggtcctggggaagcctctagggctgaaagactgcatcatcgtcggtggcatggacatggtggcccaggcgctggagctctctcggaaaccacacgtggtcatcgccacgccggggcgcctggcagatcacctgcgcagctccaacacttttagtataaagaagatccgcttcctggtgatggatgaggcagaccggctgctggaacagggctgcactgacttcaccgtggacctggaggccatcctggcggctgtgccggcccgcaggcagacactgctgttcagcgccacgctgaccgacacactccgggagctgcagggtctggccaccaaccagcccttcttctgggaagcacaggccccggtgagcaccgtggagcagctggaccagcgctacctgctggtgcctgagaaggtcaaggacgcctacctggtccacctgatccagcgcttccaggatgagcacgaggactggtccattatcatcttcaccaacacgtgcaagacctgccagattctgtgcatgatgctgcgcaaattcagcttccccaccgtggctctgcactccatgatgaagcagaaagaacgctttgccgccctagccaagttcaagtccagcatctaccggatcctgatcgcaacagacgtggcctcccggggcctggacatccctacggtacaggtggtcatcaaccacaacacccccgggctccccaagatctacatccaccgagtcggccggacggcccgtgcagggcggcagggtcaggccatcacgctggtgacacagtacgacatccacctggtgcacgccatcgaggagcagatcaagaagaagctggaggagttctccgtggaagaggccgaggtgctacagatcctcacacaggtcaacgtggtgcgaagagagtgtgagatcaaactggaggcggcccactttgacgaaaagaaggagatcaacaaacggaagcagctgatcctggaggggaaggaccctgacctggaggccaagcgcaaggctgagctggccaagatcaagcagaagaaccggcgcttcaaggagaaggtggaggagacgctgaagcgacagaaggctggcagggctggccacaaggggcgtccacccaggacaccgtctgggtcccactcaggcccagtcccctcccagggcctggtctgagccccacacggccatctgcccagtccttgactcgtccatggagctgagggtcggaggaaccttccttgggggcagcagcccttcccgggggcctacccagtgccccacagcagaacccgtgggcgctcgtgttgtgcgggccctgctcctctgccccgaaaccactggctggccccttccctgagccctggccaagattcaggctgcaggggaagaaagaacatgaccgggaggttgtgaccccaacccaaggtcaccccccaggggtgccgcatacaggaggtgcttaataaacgggtcttttgacttccaaaaaaaaaaaaaaaaaaaaaaaaaaaaaaaaaaa

SEQ ID NO: 2974 - DNA, 299 bp, Homo sapiens
cagtctgtgctgacgcagccgccctcagtgtctggggccccagggcagagggtcaccatctcctgcactgggagcagctccaacatcggggcaggttatgatgtacactggtaccagcagcttccaggaacagcccccaaactcctcatctatggtaacagcaatcggccctcaggggtccctgaccgattctctggctccaagtctggcacctcagcctccctggccatcactgggctccaggctgaggatgaggctgattattactgccagtcctatgacagcagcctgagtggttc

SEQ ID NO: 2975 - DNA, 773 bp, Homo sapiens
aacgagagggcgggaacaggaagtgaggataggccgagttccgggcgcgaggcggccaccgtggagagcagagcgcggcggctggaagctgctaagtcagagccgcgatgttccggattgagggcctcgcgccgaagctggacccggaggagatgaaacggaagatgcgcgaggatgtgatctcctccatacggaactttctcatctacgtggccctcctgcgagtcactccatttatcttaaagaaattggacagcatatgaagacaggacatcacatatgaatgcacgatatgaagagcctggttacagtttcgactcctctctgcaagtgaataggcccagaaaggtgtaagagactctttgaatggacataaaattctgcttgttaagaacaagtttggctctggtaactgaccttcaaagctaaaatataaaactatttgggaagtatgaaacgatgtctcgtgatctggtgtacccttatccctgtgacgtttggcctctgacaatactggtataattgtaaataatgtcaaactccgttttctagcaagtattaagggagctgtgtctgaaatggcactgtcttgtcagtcatttctgtttacctttttcttctgcccagagtgtatttgtgaagagtctcttatattatgttttgtggaaatcagcacacaaccacaatgacatttaagcacaggatcattattagtctatgtttttaataaacatatcaattaagaaaaaaaaaaaaaaaaaaaaaaaaaaaaa

SEQ ID NO: 2976 - DNA, 2952 bp, Homo sapiens
gctggttgggacccgggaaggcctccctcttaaggtctttcccacacctctgcaccttgttacctgactttcggcttcaggatccgcagcgtgcacccgcgttccatctgtcttctgagactttgcccttctccaggaagagcactcaggagaccaggaaaatggccacagggctcctgagagccaaaaaagagctggcaagcagatgaattaactcccccaagcttctagctgtgtttctactcagtgggagagatttggagtgaatcatgagggtcaaccacacagtgtctacaatgctccctacatgcatggttcacagacaaaccatgagttgttccggggctggaggaataacggcgttcgtggcattcagggatgtggctgtgtacttcacccaggaggagtggaggttgttgagccctgctcagaggaccctgcacagggaggtgatgctggagacttataaccatctggtctcactggaaattccatcttctaaaccaaaactcattgctcagctggagcgaggggaagcgccctggagagaggagagaaaatgtccactggacctctgtccagaatcgaagccagaaattcaacttagtccctcctgccctctgattttctccagtcagcaagctctcagccaacatgtgtggctgagtcatctctctcagctgttttcaagtttatgggcaggaaatcctctccacctgggaaaacactatccagaagatcagaaacaacagcaggatccattctgctttagtggcaaagcagaatggattcaagagggagaagactccagactcctgtttgggagagtaagcaaaaatggcacttcaaaggcactttccagcccacctgaagaacaacagccagcacagtccaaggaagacaacacagtggtggatatagggtccagccctgaacggagggcagatctagaggaaacagacaaagtattgcatggtttagaagtctcaggatttggagaaatcaaatatgaagagtttgggccaggctttatcaaggagtcaaacctccttagcctccagaagacacaaactggggagacaccttacatgtacactgagtggggagacagctttggcagtatgtcagtcctcatcaaaaacccaaggacacactctgggggaaagccttatgtgtgcagggaatgtgggcgaggctttacgtggaagtcaaacctgatcacacatcagaggacacactcaggggagaaaccttatgtgtgcaaggattgtggacgaggctttacttggaagtcgaacctctttacacatcagcggacacactcagggctcaagccttatgtgtgcaaggaatgtgggcagagctttagcctgaagtcaaacctcattacccaccagagggcgcacactggggagaagccttatgtttgcagggaatgtgggcgtggctttcgccagcattcacacctggtcagacacaagaggacacattcaggagagaagccttacatttgcagggagtgtgagcaaggctttagccagaagtcacacctcatcagacacttaaggacacacacaggagagaagccttatgtatgcacagaatgtgggcgtcactttagctggaaatcaaacctcaaaacacaccagaggacacactcaggggttaaaccttatgtctgcctggagtgcgggcagtgctttagcctgaagtcaaaccttaacaaacaccagaggtcacacacgggggagaagccatttgtatgtacggagtgtgggcgaggctttacccggaaatcaaccctgagcacgcaccagaggacacactcaggggagaagccatttgtatgtgctgagtgtggacgaggctttaatgataagtccaccctcatttcacaccagaggacacattcaggggaaaagccttttatgtgcagggagtgtggcagaaggtttcggcagaagcctaacctgtttaggcacaagagggcacactcaggtgcctttgtgtgcagggagtgtgggcaaggcttttgtgctaagttaactctcattaaacaccagagagcacacgcaggggggaagcctcatgtgtgcagggagtgtgggcaaggctttagccggcagtcacacctcattagacaccagaggacacattcaggagagaagccttatatttgcagaaagtgtggacggggctttagtcggaagtccaaccttatcagacatcagaggacacactcaggatagaaactttatgtgtatagggaatgtggtacagcctttagccaggagtcatacttcatcagacaccagaggacacacacagtgctgtggctttttcagccattgctagataccaaagtggagacattctgtgtgtgattatgcatgagactgtactggtaagacttgtatctccatccacctgaaggagaattgctggctcattttcaggagccctgcccttcctcactgtggatggtgggttgtggaaacccggtcaggtaatgatagtggcaggaggcagtcaaatgcccaggcagataggggtgggtacctggtgaaacccaaccttaaagctgaagacagtcccggctaaatcctcatactgaattgagaacctgtcttcccatttggtgtgctttcctccgattgatcccaacccttcacctattttacgtatacctgccctttcctaattggtttttacactgctgtgcccaccttttgagtggtgcctttgcatacttacaaatcagtcaacgtgtattcccctattctgagcccataaaagacccagactcagctgcagtgaggagagaaatcaccctgctgtgggggttggggaccactccctgcatcccctctccactgagagctgttcttttgctcaataaaattcttttctacccatcctcacccttcaaaaaaaaaaaaaaaaaaaaaaaaa

SEQ ID NO: 2977 - DNA, 1799 bp, Homo sapiens
gcttccccgagcgccgtcggtggtcatggctgccccagcctcccggcaggtccgacgcagagcccgggcagcgccgcggccccgctcggccgaggactggtggtgggaccggctggcgccgaggggctcggggtaccacctgctgcagtccgacagcatgctgctggtgctgtccgaacccggccccgcccggccccgcgcacagcggcgcgcttcccgccgcactccccggcagccgccccggggccccagcgccgcggccaagcccaaggccgggctcaggtccgaggcggcggccgcgcccgcacccgcaccggcacccacgcccacgcccgaggaagggcccgacgcgggctggggagaccgcattcccttggaaatcctggtgcagattttcgggttgttggtggcggcggacggccccatgcccttcctgggcagggctgcgcgcgtgtgccgccgctggcaggaggccgcttcccaacccgcgctctggcacaccgtgaccctgtcgtccccgctggtcggccggcctgccaagggcggggtcaaggcggagaagaagctccttgcttccctggagtggcttatgcccaatcggttttcacagctccagaggctgaccctcatccactggaagtctcaggtacaccccgtgttgaagctggtaggtgagtgctgtcctcggctcactttcctcaagctctccggctgccacggtgtgactgctgacgctctggtcatgctagccaaagcctgctgccagctccatagcctggacctacagcactccatggtggagtccacagctgtggtgagcttcttggaggaggcagggtcccgaatgcgcaagttgtggctgacctacagctcccagacgacagccatcctgggcgcactgctgggcagctgctgcccccagctccaggtcctggaggtgagcaccggcatcaaccgtaatagcattccccttcagctgcctgtcgaggctctgcagaaaggctgccctcagctccaggtgctgcggctgttgaacctgatgtggctgcccaagcctccgggacgaggggtggctcccggaccaggcttccctagcctagaggagctctgcctggcgagctcaacctgcaactttgtgagcaacgaggtcctgggccgcctactccacggctctcccaacctgcgcttactggatcttcgtggctgtgcgcgcatcacgccggctggccttcaggatctgccatgtcgggagctggagcagcttcatctgggcctgtatggcacgtcagaccggctgactctagccaaggagggcagcccctttttgacccagaagtggtgccatacactgcgagaactggacttgagtggccaggggttcagtgagaaggacctggagcaggccctggctgccttcttaagcacccctgggggctcacacccagccctgtgctctcttaacctcaggggcacccgggtcacaccaagcactgtcagctctgtgatcagcagctgcccgggcctgctctacctcaacctggagtcctgccgctgccttccccggggtctgaagcgggcctaccggggcctggaggaagtccagtggtgtctggagcagctgctcaccagcccctcacccagctaggcagccacagacctgggacacctcagccagcttgcccaccctccacctttgcccaatttcagatatttgagcattttgttaaaataaaacatttttaggaaaaaaaaaaaaaaaaaaaaaaaaaaaaaaaaaaaaaaaaaaaaaaaaaaaaaaa

SEQ ID NO: 2978 - DNA, 1781 bp, Homo sapiens
gcttccccgagcgccgtcggtggtcatggctgccccagcctcccggcaggtccgacgcagagcccgggcagcgccgcggccccgctcggccgaggactggtggtgggaccggctggcgccgaggggctcggggtaccacctgctgcagtccgacagcatgctgctggtgctgtccgaacccggccccgcccggccccgcgcacagcggcgcgcttcccgccgcactccccggcagccgccccggggccccagcgccgcggccaagcccaaggccgggctcaggtccgaggcggcggccgcgcccgcacccgcaccggcacccacgcccacgcccgaggaagggcccgacgcgggctggggagaccgcattcccttggaaatcctggtgcagattttcgggttgttggtggcggcggacggccccatgcccttcctgggcagggctgcgcgcgtgtgccgccgctggcaggaggccgcttcccaacccgcgctctggcacaccgtgaccctgtcgtccccgctggtcggccggcctgccaagggcggggtcaaggcggagaagaagctccttgcttccctggagtggcttatgcccaatcggttttcacagctccagaggctgaccctcatccactggaagtctcagctggtaggtgagtgctgtcctcggctcactttcctcaagctctccggctgccacggtgtgactgctgacgctctggtcatgctagccaaagcctgctgccagctccatagcctggacctacagcactccatggtggagtccacagctgtggtgagcttcttggaggaggcagggtcccgaatgcgcaagttgtggctgacctacagctcccagacgacagccatcctgggcgcactgctgggcagctgctgcccccagctccaggtcctggaggtgagcaccggcatcaaccgtaatagcattccccttcagctgcctgtcgaggctctgcagaaaggctgccctcagctccaggtgctgcggctgttgaacctgatgtggctgcccaagcctccgggacgaggggtggctcccggaccaggcttccctagcctagaggagctctgcctggcgagctcaacctgcaactttgtgagcaacgaggtcctgggccgcctactccacggctctcccaacctgcgcttactggatcttcgtggctgtgcgcgcatcacgccggctggccttcaggatctgccatgtcgggagctggagcagcttcatctgggcctgtatggcacgtcagaccggctgactctagccaaggagggcagcccctttttgacccagaagtggtgccatacactgcgagaactggacttgagtggccaggggttcagtgagaaggacctggagcaggccctggctgccttcttaagcacccctgggggctcacacccagccctgtgctctcttaacctcaggggcacccgggtcacaccaagcactgtcagctctgtgatcagcagctgcccgggcctgctctacctcaacctggagtcctgccgctgccttccccggggtctgaagcgggcctaccggggcctggaggaagtccagtggtgtctggagcagctgctcaccagcccctcacccagctaggcagccacagacctgggacacctcagccagcttgcccaccctccacctttgcccaatttcagatatttgagcattttgttaaaataaaacatttttaggaaaaaaaaaaaaaaaaaaaaaaaaaaaaaaaaaaaaaaaaaaaaaaaaaaaaaaa

SEQ ID NO: 2979 - DNA, 1414 bp, Homo sapiens
gccaggaccctggaaggaagcaggatggcagccggaacagcagttggagcctgggtgctggtcctcagtctgtggggggcagtagtaggtgctcaaaacatcacagcccggattggcgagccactggtgctgaagtgtaagggggcccccaagaaaccaccccagcggctggaatggaaactgaacacaggccggacagaagcttggaaggtcctgtctccccagggaggaggcccctgggacagtgtggctcgtgtccttcccaacggctccctcttccttccggctgtcgggatccaggatgaggggattttccggtgccaggcaatgaacaggaatggaaaggagaccaagtccaactaccgagtccgtgtctaccagattcctgggaagccagaaattgtagattctgcctctgaactcacggctggtgttcccaataaggtggggacatgtgtgtcagagggaagctaccctgcagggactcttagctggcacttggatgggaagcccctggtgcctaatgagaagggagtatctgtgaaggaacagaccaggagacaccctgagacagggctcttcacactgcagtcggagctaatggtgaccccagcccggggaggagatccccgtcccaccttctcctgtagcttcagcccaggccttccccgacaccgggccttgcgcacagcccccatccagccccgtgtctgggagcctgtgcctctggaggaggtccaattggtggtggagccagaaggtggagcagtagctcctggtggaaccgtaaccctgacctgtgaagtccctgcccagccctctcctcaaatccactggatgaaggatggtgtgcccttgccccttccccccagccctgtgctgatcctccctgagatagggcctcaggaccagggaacctacagctgtgtggccacccattccagccacgggccccaggaaagccgtgctgtcagcatcagcatcatcgaaccaggcgaggaggggccaactgcaggctctgtgggaggatcagggctgggaactctagccctggccctggggatcctgggaggcctggggacagccgccctgctcattggggtcatcttgtggcaaaggcggcaacgccgaggagaggagaggaaggccccagaaaaccaggaggaagaggaggagcgtgcagaactgaatcagtcggaggaacctgaggcaggcgagagtagtactggagggccttgaggggcccacagacagatcccatccatcagctcccttttctttttcccttgaactgttctggcctcagaccaactctctcctgtataatctctctcctgtataaccccaccttgccaagctttcttctacaaccagagccccccacaatgatgattaaacacctgacacatcttga

SEQ ID NO: 2980 - DNA, 1259 bp, Homo sapiens
gccaggaccctggaaggaagcaggatggcagccggaacagcagttggagcctgggtgctggtcctcagtctgtggggggcagtagtaggtgctcaaaacatcacagcccggattggcgagccactggtgctgaagtgtaagggggcccccaagaaaccaccccagcggctggaatggaaactgggaggaggcccctgggacagtgtggctcgtgtccttcccaacggctccctcttccttccggctgtcgggatccaggatgaggggattttccggtgccaggcaatgaacaggaatggaaaggagaccaagtccaactaccgagtccgtgtctaccagattcctgggaagccagaaattgtagattctgcctctgaactcacggctggtgttcccaataaggtggggacatgtgtgtcagagggaagctaccctgcagggactcttagctggcacttggatgggaagcccctggtgcctaatgagaagggagtatctgtgaaggaacagaccaggagacaccctgagacagggctcttcacactgcagtcggagctaatggtgaccccagcccggggaggagatccccgtcccaccttctcctgtagcttcagcccaggccttccccgacaccgggccttgcgcacagcccccatccagccccgtgtctgggagcctgtgcctctggaggaggtccaattggtggtggagccagaaggtggagcagtagctcctggtggaaccgtaaccctgacctgtgaagtccctgcccagccctctcctcaaatccactggatgaaggatgtgagtgacctggagagaggggctgggagaaccaggcgaggaggggccaactgcaggctctgtgggaggatcagggctgggaactctagccctggccctggggatcctgggaggcctggggacagccgccctgctcattggggtcatcttgtggcaaaggcggcaacgccgaggagaggagaggaaggccccagaaaaccaggaggaagaggaggagcgtgcagaactgaatcagtcggaggaacctgaggcaggcgagagtagtactggagggccttgaggggcccacagacagatcccatccatcagctcccttttctttttcccttgaactgttctggcctcagaccaactctctcctgtataatctctctcctgtataaccccaccttgccaagctttcttctacaaccagagccccccacaatgatgattaaacacctgacacatcttga

SEQ ID NO: 2981 - DNA, 2371 bp, Homo sapiens
atccgcagccaactgtgtggcggtccccactttcgcctagcggcaactccctccctccctgcaatccttccttcttattccggtttccagagcacgtctccaggcttcgacgtcaccacgctgggacgtatgtgccgagggccgcggcgtctgacctcatggcgtagagcctagcaacagcgcaggctcccagccgagtccgttatggccgctgccgtcccgaagaggatgagggggccagcacaagcgaaactgctgcccgggtcggccatccaagcccttgtggggttggcgcggccgctggtcttggcgctcctgcttgtgtccgccgctctatccagtgttgtatcacggactgattcaccgagcccaaccgtactcaactcacatatttctaccccaaatgtgaatgctttaacacatgaaaaccaaaccaaaccttctatttcccaaatcagcaccaccctccctcccacgacgagtaccaagaaaagtggaggagcatctgtggtccctcatccctcgcctactcctctgtctcaagaggaagctgataacaatgaagatcctagtatagaggaggaggatcttctcatgctgaacagttctccatccacagccaaagacactctagacaatggcgattatggagaaccagactatgactggaccacgggccccagggacgacgacgagtctgatgacaccttggaagaaaacaggggttacatggaaattgaacagtcagtgaaatcttttaagatgccatcctcaaatatagaagaggaagacagccatttcttttttcatcttattatttttgctttttgcattgctgttgtttacattacatatcacaacaaaaggaagatttttcttctggttcaaagcaggaaatggcgtgatggcctttgttccaaaacagtggaataccatcgcctagatcagaatgttaatgaggcaatgccttctttgaagattaccaatgattatattttttaaagcactgtgatttgaatttgcttatgtaattttatttgcttgactttttatatgatattgtgcaaatgtttgccataggcaattggtacttaaatgagaggtgagtctctcttttgccttggtgctttggaaattaaatgtcacaaacgagtatataattttttatctgtacttttagagctgagtttaatcaggtgtccaaaatgtgagttaaacattaccttatatttacactgttagtttttattgttttagatttattatgcttcttctggaagtattagtgatgctacttttaaaaggatcccaaacttgtaactaaattctgacatatctgttactgctgactcacattcattctccgccattcaaatactattttttatccacattttttttttgttccccaaactgtaatgtacaaggatatgtgtgataatgctttggatttgagtaatatttttttttcttccaagaaaactgctttggatatttttagataatttaaacataatttaggataatgatattgctcaatctgaccacaattttaggtaaaacattaaatgtgtcaagaaatcttggcaacagagactctgcagcttgcagtggacatagataaaatgttacagagatactatttttttggttggaattactatattaaatttagaagcagaaactggtaaaatgttaaatacatgtacaattgcttttagttagcaattgattgtagcatgggttcctccaaggtttcaagcaatgggcagagtttaaaattatatcagattcgtttacttcgtttattattttacagtaaatttgaataaatcttaggggtcattatcacttaaataatactgtacctaggtctttcaaattaaaattatacctgaatgaagttgtttgtatacataaaggatatttgtgtacaattaccttttttcccccacacttgttttctttgtttttgttttttatggcaactggaaagtatttactatgggattcatttatgtctgtctttctatcataaagaattgatcaatatgtaaatatgtgatttgaaccatggttgacttacaagtgtcactacagctttttagaaaacatagccctaatatatgttaagcaggacccgggtgagccagtgggcttgcgctttatgtagagctggaagaaggccgtccatcctgtctcttgggcggacagtgtactttcctaatagggaagggaagcacaatggaaatacccctgaaccgttttattgcagtaatttttttcatatctgaaactattatttaatattttgaataagattttaaaaaataaatggcaaagatataaatctaaaaaaaaaaaaaaaaaa

SEQ ID NO: 2982 - DNA, 1342 bp, Homo sapiens
gaggaagtgacgacaggcgtgcccttgacaggcagggagggctaggctgtgcatccctccgctcgcattgcagggagatggctcagcgacttcttctgaggaggttcctggcctctgtcatctccaggaagccctctcagggtcagtggccacccctcacttccagagccctgcagaccccacaatgcagtcctggtggcctgactgtaacacccaacccagcccggacaatatacaccacgaggatctccttgacaacctttaatatccaggatggacctgactttcaagaccgagtggtcaacagtgagacaccagtggttgtggatttccacgcacagtggtgtggaccctgcaagatcctggggccgaggttagagaagatggtggccaagcagcacgggaaggtggtgatggccaaggtggatattgatgaccacacagacctcgccattgagtatgaggtgtcagcggtgcccactgtgctggccatgaagaatggggacgtggtggacaagtttgtgggcatcaaggatgaggatcagttggaggccttcctgaagaagctgattggctgacaagcagggatgagtcctggttcccttgcccgcgtgggaccccaatagaactcagcccttccatgccagcccttcctgctgcctccctcctgtctggctcctggggcccatgcttagagcccaggctccagccctgagtgcttccgagctggcggactgcccaggggccatcagaggatggtggtgctgctgctgatccggggaccgctgtcttccctcccatacgcctttcatccctccttctagggcctatggcagttctcccaggatgtgtggcgagagcctgggccagcccacagcgttcctagtcaggcagccacaccttggtcctcatcttggtcccttccaatctgaaacctcgtgcctggctcgtctgccacctacatttctctttccagctgctgttttgtaaaaagaaaaagaaaaaagaagcccaaactagtgagagtaatatctaattatctcattttttgtaggtctgtgataaagaacttagtcatcccttccacctcctactgtgaagaacagaccctgggtcccacactgaaatcccctctagtcacccattcccaccccccagggagctgcctcccaggcagggggtgcagaaaatgattgatgggctggggaaccctggagagcctcgactccggaagtctcaaggtgcctcctcctctccttagctggcccgttggttttctgagcagggggctgaactgtgaacaagtcagacaaataaagcaagggtctgcaccatcaaaaaa

SEQ ID NO: 2983 - DNA, 2349 bp, Homo sapiens
ggtttccggcggaggtggtgagagtcgcacgcgcagcggggaaggtgtgagtcgtgaacggcccgggtctccgccatggcctctctactcgccaaggacgcctacctgcagagcctggccaagaagatctgctcccattcggccccggaacagcaggcgcgcacgcgggctggcaaaactcaaggctcagaaactgcagggcccccaaaaaagaaaaggaagaaaacacaaaagaaattccggaagcgagaagagaaggctgctgagcacaaggccaagtccttgggggagaaatctccagcagcctctggggccaggaggcctgaggcagccaaagaggaagcagcttgggcttccagctcagcagggaaccctgcagatggcctggccactgagcctgagtctgtctttgctctggatgttctgcgacagcgactgcatgagaagatccaggaggcccggggccagggcagtgccaaggagctgtcccctgccgccttggagaaaaggcggcggagaaagcaggaacgggaccggaagaagaggaagcgaaaggagctgcgggcgaaagagaaggccaggaaggctgaggaggccacggaggcccaggaggtggtggaggcaaccccagagggggcctgcacggagccgcgggagccgcccgggctgatcttcaataaggtggaggtgagcgaagacgagccggccagcaaggcgcagcgcagaaaagagaagaggcagagggtgaaggggaacctcacgccgctgaccgggaggaactaccggcagctgctggagcgcctgcaggcacggcagagccggctggacgagctgcgcggccaggatgaggggaaggcgcaggagctggaggcgaagatgaagtggaccaacctcctctacaaggcggagggcgtgaagatccgtgacgacgaacgcctgctgcaggaggccctgaagcgcaaggagaagcgcagggcgcagcggcagcgccggtgggagaagcgcacggccggcgtggtggagaagatgcagcagcgccaggaccggcggcggcagaacctgcgcaggaagaaggcggcccgcgccgagcgccgcctgctcagagcccgcaagaagggccgcatcctgccgcaggacctggagcgcgcaggcctggtctgagtctttcccacctggggccgccgtcttccgtcctaggagactccaggacaccctctgagtccttgacgctggctctgtcccaggatctccacagacctcggcctctccatgtgagggggacacagtggtgctctgctgagttgtgagggcccagatcacagatcccatgtgagaaagagagagtttcagcgtcatccttgaacgcaggatccgggaccttcagacccagggaaagggtgagggagactggggcctggtctgctttcccgggcctgaaagcttccccgaggtttgcagggtcagggaggaggaacggtgggggtgggcagtcactgcctgttccccactgcctgtgttcgcaggagccacgggacagaagacggtggcctctgctgccgggccacgttagtccgcagctcacccgaacagaggacaaccctgaggtgtggcatatgggcacctggcactgggagtcgggggagcacgtccaggcgtggtgcatcctggggcagaacgccatggctcctccccgctctcttggcttctgcctgttggggtctcattcctttctgttccccagtgccccggggcggcattttactgctcagaatttggagggagggagcagtaccttcccggagtccacgcatgtgagttgggtcaagtgcattggacctagggaaagagaaagaaagaataaaagctggagagagagtgaagtgaatgcaagatacaaagtgggatggaagaattaaatccagagttccaggcaatcaaaatgagtgcaggttgaaagaaaacaggtgaattttagtggcatatggatgataaagctgtaaataaaattcttttgatgaaactctccggttatgagacaaagactgtaactgaacaggagctggtgtgactgttaccagacagaggcaactgatgaaaaagccctgtgaaagataggatgtgaggtgagcatgagcttgagctgagagacagacacaacagtatctgaaaagaatacatactctttccatgcatatatggaacatggatggaaactgaccacctactttgtccagaaaagaagtcttaagatatttcaaggaatcagtgtcgttatctgaccgtatcccaatgtcattaaaaaaaatttgagctaaaaaaaaaaaaaaaaaaaaaaaaaaaaaaaaaaaa

SEQ ID NO: 2984 - DNA, 1839 bp, Homo sapiens
cgcgatggagggaggaggaggtatacccctagaaacacttaaagaagaaagtcagtcaagacatgttctacctgcaagttttgaagtcaacagtttgcagaaaagcaactgggggttcttacttactgggcttgtgggtggcaccctggtggctgtgtacgctgtagccacgccgtttgtaacgccagcccttcgaaaagtctgtttgccatttgtacctgcaactatgaagcagattgaaaatgttgtgaaaatgttgcgatgccgaagaggatcccttgtggacatcggtagtggggacggacgcattgtcatagcggctgcgaagaaagggttcacagcagttggttatgaattaaacccatggctagtttggtattccagataccgcgcttggcgagaaggtgtgcatggatctgccaaattttatatttcagatttgtggaaggttactttttcgcagtactcgaacgttgttattttcggtgtgcctcagatgatgctgcagttggagaagaaacttgaacgtgaacttgaggatgatgcacgagttattgcttgccggttccctttcccacattggactccagaccacgtcacgggggaggggatagacacagtgtgggcatatgatgcaagcacttttagaggccgtgaaaagaggccctgtacatcgatgcatttccagctgcccattcaagcataaactttactgggagtgtttttctgaaatattgtagtcttccctgatcttgtagagacttacagctgtgtccttagcaaaggagcataattgtctttggtttggaatgagaaattactattactttccttaactgttggagaaaacaaacgaagaaaaacaggtagatttaaaatctgcttttgatgctattttcttaaaaattgtacttactgcctttccatgcacctggatgcatgaaaagatgaataagtgatggtcatggttatgggtaggaaaataagatgccaatagctcttcacattataaacaatatggcttaatgcctcgataaggagaaatgatttttaaagacagtatatattaccaactgtttgtagtatcctataactttgttcatacttaagttgtatctctttcctttttgtacttcatggcaaaattaattttctaaaggattcagagaggcgtttatattttataacatttattagaaataatttgttccaccactagattactgtattttatggaatctaagctgtatatgtgtacatttgtatacatgtatgtgtaaatgtaagcctgacgtgggttcagattccagttttgtcatcagcaagaggcctcggacccatgacttactgcctctgagccttggctttctgtgtatctctgccactgggataatggtacacataacagtggagtggggaccaatttctaaaactcatggcacctagtctttggtccataaatggtgtttgttattttagacactgagaaaaatcttattcacagaagttgcagattatttctgctagtcacttttttatttcttgagagctgccactcatttaatatttctcatttatgagaagagacttgactgatttagataaaagacgaattaaggaaaacctttgaacgtgagtagacaagcttcatatatctgtaaagtgaatattgaatggtagcttgagtcattcgtacttatcacagaaaagaattgaactcccagtcatacacctgtaactgaaataccaaactgtcttaatggagatgtaatgaagtaagatggtcacatctttaactaaacttataaaaattgaaaaaaaaaaaaaaaaaaaaaaaaa

SEQ ID NO: 2985 - DNA, 2247 bp, Homo sapiens
tcttctctgtgctgcgagtggctagctgggcagagccctgggggcgcggtgctgccgcctccaggtctccgccccgtgtgtgcgccctgcacttagggatccctccctcactgccccggtactcacaagcttctcggccccgaccttcgccctgggaggttctggccaggtgccgggaggggcgctgtgtcgagggcgatccccccaaagcagcgtcccgtgctaaagaaacagagcctcactctgtcacctaggctggagtgcagtggtgcaattatggctcactgcagtttcaacctcccagattccagtcatcctcctgcctcagccacccaagaagctgggaccacagggatcacatgcagtggtctaaggaagaagaagcagcagccagaaaaaaagtaaaagaaaactcagctgtgcgagtccttctggaagagcaagttaagtatgagagagaagctagtaaatactgggacacattttacaagattcataagaataagtttttcaaggatcgtaattggctgttgagggaatttcctgaaattcttccagttgatcaaaaacctgaagagaaggcgagagaatcatcatgggatcatgtaaaaactagtgctacaaatcgtttctcaagaatgcactgtcctactgtgcctgatgaaaaaaatcattatgagaaaagttctggttcttcagagggtcaaagcaaaacagaatctgatttttccaacctagactctgaaaaacacaaaaaaggacctatggagactggattgtttcctggtagcaatgccactttcaggatactagaggttggttgtggagctggaaatagtgtgtttccaattttgaacactttggagaactctccggagtcctttctgtattgttgtgattttgcttctggagctgtggagctcgtaaagtcacactcgtcctacagagcaacccagtgttttgcctttgttcatgatgtatgtgatgatggcttaccttacccttttccagatgggatcctggatgttattctccttgtctttgtgctctcttctattcatcctgacaggacattgtttatctgaaaatttttatgttcgaggagatggtaccagagcatatttctttacaaaaggggaagtccacagtatgttctgcaaagccagtttagatgaaaagcaaaatctggttgatcgccgcttacaagttaataggaaaaaacaagtgaaaatgcaccgagtgtggattcaaggcaaattccagaaaccattgcaccagactcagaatagctccaatatggtatctacactcctttcacaagactgaactttgtaacatgttaaggtacaaagccagaggactgtgctattcaaggactactgtaagtctattgtttctcaaaagacaatgagaaaaaaagaagagaatttgtatttcctgccgttttgtcataggtgagctcctttgtgcattttaagcacatgtaagtggttcagcacagtatgcctttttctgtgctttgaaaacttgatatgctcaagcttgtttgaatttattacatctaaccattttgcttgttccttgatttttataagcattcaattaagttagtattatgtcaagtaattttgagaaaatgtaacttgacattttttgcaagtaaaaaaaattgtttatttgtttaggcttagtaaaccagttcccaaacacagtcagactcttcccattgtcatctgattgcagagagaaagcacaccttatttccagggaaagctacaacaagcccaaggtcaaagtgtattattttttgtcttgttgttgtctattttctcccaatttttttttgaaattcagaggctcatatctgaaatagaattttagttcctctttcctttcctaaaattggggaagtacagcccatgctgacattattttcaggctattcttagatatacaagttgttaggccaggtgcaatggctcgcacctgtaatcccagcactttggggggctgaggcaggcagatcgcttgagctcaggagttcaagaccagcctggacaacatggcaaaaccctgtctctcccaagaatacaaaaattagccaggcatggtggcacacacctgtggtcccagctactcaggagactgaggtgggaggatcgcttgagcctcggaggcggaggttgcagtgagctgagattgtaccactgcgctccaaactgggtgacatggtgagaccttgtctcc

SEQ ID NO: 2986 - DNA, 3193 bp, Homo sapiens
aatcgcgtcgccgccgcttccgccctcagccggccccacctctgccggctcgtactcggctcccccacctcgccgcagagctagcccgggaagcccacactggcggccacggagcagagtccctcacccccaccagctgtagctgaacgtctggatggtggagaagagcagatgatctgtactggacacacgtggagatatggccatgccacgcatgtgcaaacagaggtgtacacacaggagtgcagtgatacaggacacagataaacagaatgtacacagccttcaggaaggatctcaaggtcagggttccgagtctgaggaagacataaccttgtgcctgcctgcccacctctctctctggtcctgttcatctctcaggctctgagacactgaccttcactgctcagttaaaggttccagggattccactttgtctggacccatccagctgagtgaacccagggtggtggtgtatctggggagagtgaggagtgggttgtccaaacaccagggaaagagccctttggggcctcagacagcggagtgaagctggaaccatcagggaacatgagtgaattttggcacaaactgggctgctgtgtggtagagaaaccccagccgaagaagaagagaagacggattgaccggaccatgattggggaaccaatgaattttgttcacctgactcacattggctcaggggagatgggggccggagatggacttgccatgacaggtgcagttcaggagcagatgagatccaagggaaaccgagataggccatggagcaattctaggggcttatagctccaataatggaatggttctgccatcttgaaacccccattctgtttccagcccagaagaaatgctgcccctaccagatccctccttgaaccagtgatctaaggacccctcttttccctatctgcctaacagtgcctcacaaggcttgggggctggactccctctactccctctggccatagcccctcctggagatggggtcaaggcagcaggactgatcaagtgactactggttagccagaggagctcagctgaagccctggaaaccctcaggtctgagataggagttctctaggaacctggaatgagttcctgtctcctgaatgatggtctgggtgccacctgtttttaaactcttaaacctggaactccttaaatggggtaggtgggtgagattatcaaagctgaagctggctttgctgagaagctccctacctccctgcccttctcctccttcctgctggaatgaactaaagcagatgtcaagcaggggctggtgggggtgcctactcccttttccactctatctttagatttcaaaccttaggcttacagcccctcaatatctctctgctaacaccagtgtctctttctagttaggcctctaatcttctgtttctgtttaccagcttcccagcaactttccttttttaaaatattaaaaatttaattcaggttctcttaattatcctcatcctgctgttgcctccgcccttaactctatccctattaggaaccttgtttcccaccgaataagagttaaggtaagaggtagctcttcacctgatgacattccatttaagttttggggcatctttcctgccctctgccaacctccctgctggcccaggtgagaggaggaagaggggtctggaaagaaacccagaatgcggcagaactaggagtaagtccatctcaaggtggacttctgatcattgaggatggtgagataaataggttgaaaacaatcatctgtgagtttaggagtcttaagatcctcacagcacgggagcagggagaggctctagaacaaggtttcacaaccgagatgcctttgacattttgggctgaagtgttctttgtaaggaaaacctgtttcctattttgtgcattacaggatatttagcagcaaccctggcccactctagttatgacaaccaaaaatgtctctatacattgccagatttctcctagggggcaaaatcgcctccatttgagaaccacaactctaaagtcaagatatttttctctgaagtgatttctgcttggcacgctaccctcatcatcttactcatcttaagcccgagccatggatcaactaggagcccatataaatgaggctcagtagggctgcacataatctccaaacaattctttattcagtgttttgcttgtgtttgcatgttgctatgatggacaggtccccctcctccattcttgccctctggagaagtggttcctgcagtgtagagatatgaacagggtatggtaggattggggaaaggggagagagaagcagtagatacactccttatcctccccaaattttaagctctatttctgtgccctagtcctagacacacattagactcagggagttttgtctgaagaccaggtcccactgccccctggctgaagagtctgctttaaatgggaaaacaacgtaggagcaggggtttttaggcactttcagtattctcaggtgttcttcgttctggcccttccagggtaattaggaaggcagaacaagacagatgagctcctgcctgctctgagacaagaagggtggggtctcattagctttgcaacaggaaacatcctgttttatggtagtggggtcaggaatgtaggaactggtatccattctgccaattccaccacccattcagtttgcttatccctacagaacagtgactgaggttctttttttttttttttttttttttttttcaaatttccatgtattttctgccatttttcagggtctaagattggtcatacattcccaatttactctcagttccagtcaagctggttgctctgaaagtaacccagcttgttgctctaaaatacctcagtagcctgagtgttatactagagatctaaagggttaacaggatagggtggaaaggttagagactcctagaaatctctggtcaccgtgatcttcggcctcattctaatacctgttctttggacagtctttttcctttggtgctctcttgcctttagctaccttctctaatatgtatgctaccatcactaataaagtgatgggaatgggtttgagagtcgtaatttatattaaaaagttgttggacttttaaatacattttttcaaataaaaaattaagcaaaatagttgcacagtaaaaaaaaaaaa

SEQ ID NO: 2987 - DNA, 3057 bp, Homo sapiens
aatcgcgtcgccgccgcttccgccctcagccggccccacctctgccggctcgtactcggctcccccacctcgccgcagagctagcccgggaagcccacactggcggccacggagcagagtccctcacccccaccagctgtagctgaacgtctggatggtggagaagagcagggttccgagtctgaggaagacataaccttgtgcctgcctgcccacctctctctctggtcctgttcatctctcaggctctgagacactgaccttcactgctcagttaaaggttccagggattccactttgtctggacccatccagctgagtgaacccagggtggtggtgtatctggggagagtgaggagtgggttgtccaaacaccagggaaagagccctttggggcctcagacagcggagtgaagctggaaccatcagggaacatgagtgaattttggcacaaactgggctgctgtgtggtagagaaaccccagccgaagaagaagagaagacggattgaccggaccatgattggggaaccaatgaattttgttcacctgactcacattggctcaggggagatgggggccggagatggacttgccatgacaggtgcagttcaggagcagatgagatccaagggaaaccgagataggccatggagcaattctaggggcttatagctccaataatggaatggttctgccatcttgaaacccccattctgtttccagcccagaagaaatgctgcccctaccagatccctccttgaaccagtgatctaaggacccctcttttccctatctgcctaacagtgcctcacaaggcttgggggctggactccctctactccctctggccatagcccctcctggagatggggtcaaggcagcaggactgatcaagtgactactggttagccagaggagctcagctgaagccctggaaaccctcaggtctgagataggagttctctaggaacctggaatgagttcctgtctcctgaatgatggtctgggtgccacctgtttttaaactcttaaacctggaactccttaaatggggtaggtgggtgagattatcaaagctgaagctggctttgctgagaagctccctacctccctgcccttctcctccttcctgctggaatgaactaaagcagatgtcaagcaggggctggtgggggtgcctactcccttttccactctatctttagatttcaaaccttaggcttacagcccctcaatatctctctgctaacaccagtgtctctttctagttaggcctctaatcttctgtttctgtttaccagcttcccagcaactttccttttttaaaatattaaaaatttaattcaggttctcttaattatcctcatcctgctgttgcctccgcccttaactctatccctattaggaaccttgtttcccaccgaataagagttaaggtaagaggtagctcttcacctgatgacattccatttaagttttggggcatctttcctgccctctgccaacctccctgctggcccaggtgagaggaggaagaggggtctggaaagaaacccagaatgcggcagaactaggagtaagtccatctcaaggtggacttctgatcattgaggatggtgagataaataggttgaaaacaatcatctgtgagtttaggagtcttaagatcctcacagcacgggagcagggagaggctctagaacaaggtttcacaaccgagatgcctttgacattttgggctgaagtgttctttgtaaggaaaacctgtttcctattttgtgcattacaggatatttagcagcaaccctggcccactctagttatgacaaccaaaaatgtctctatacattgccagatttctcctagggggcaaaatcgcctccatttgagaaccacaactctaaagtcaagatatttttctctgaagtgatttctgcttggcacgctaccctcatcatcttactcatcttaagcccgagccatggatcaactaggagcccatataaatgaggctcagtagggctgcacataatctccaaacaattctttattcagtgttttgcttgtgtttgcatgttgctatgatggacaggtccccctcctccattcttgccctctggagaagtggttcctgcagtgtagagatatgaacagggtatggtaggattggggaaaggggagagagaagcagtagatacactccttatcctccccaaattttaagctctatttctgtgccctagtcctagacacacattagactcagggagttttgtctgaagaccaggtcccactgccccctggctgaagagtctgctttaaatgggaaaacaacgtaggagcaggggtttttaggcactttcagtattctcaggtgttcttcgttctggcccttccagggtaattaggaaggcagaacaagacagatgagctcctgcctgctctgagacaagaagggtggggtctcattagctttgcaacaggaaacatcctgttttatggtagtggggtcaggaatgtaggaactggtatccattctgccaattccaccacccattcagtttgcttatccctacagaacagtgactgaggttctttttttttttttttttttttttttttcaaatttccatgtattttctgccatttttcagggtctaagattggtcatacattcccaatttactctcagttccagtcaagctggttgctctgaaagtaacccagcttgttgctctaaaatacctcagtagcctgagtgttatactagagatctaaagggttaacaggatagggtggaaaggttagagactcctagaaatctctggtcaccgtgatcttcggcctcattctaatacctgttctttggacagtctttttcctttggtgctctcttgcctttagctaccttctctaatatgtatgctaccatcactaataaagtgatgggaatgggtttgagagtcgtaatttatattaaaaagttgttggacttttaaatacattttttcaaataaaaaattaagcaaaatagttgcacagtaaaaaaaaaaaa

SEQ ID NO: 2988 - DNA, 2672 bp, Homo sapiens
aggaagagccgcgggcccggcggctgaggccaccccggcggcggctggagagcgaggaggagcgggtggccccgcgctgcgcccgccctcgcctcacctggcgcaggtggacacctgcgcaggtgtgtgccctccggcccctgaagcatggccagcagcggcatggctgacagcgccaaccacctgcccttctttttcggcaacatcacccgggaggaggcagaagattacctggtccaggggggcatgagtgatgggctttatttgctgcgccagagccgcaactacctgggtggcttcgccctgtccgtggcccacgggaggaaggcacaccactacaccatcgagcgggagctgaatggcacctacgccatcgccggtggcaggacccatgccagccccgccgacctctgccactaccactcccaggagtctgatggcctggtctgcctcctcaagaagcccttcaaccggccccaaggggtgcagcccaagactgggccctttgaggatttgaaggaaaacctcatcagggaatatgtgaagcagacatggaacctgcagggtcaggctctggagcaggccatcatcagtcagaagcctcagctggagaagctgatcgctaccacagcccatgaaaaaatgccttggttccatggaaaaatctctcgggaagaatctgagcaaattgtcctgataggatcaaagacaaatggaaagttcctgatccgagccagagacaacaacggctcctacgccctgtgcctgctgcacgaagggaaggtgctgcactatcgcatcgacaaagacaagacagggaagctctccatccccgagggaaagaagttcgacacgctctggcagctagtcgagcattattcttataaagcagatggtttgttaagagttcttactgtcccatgtcaaaaaatcggcacacagggaaatgttaattttggaggccgtccacaacttccaggttcccatcctgcgacttggtcagcgggtggaataatctcaagaatcaaatcatactccttcccaaagcctggccacagaaagtcctcccctgcccaagggaaccggcaagagagtactgtgtcattcaatccgtatgagccagaacttgcaccctgggctgcagacaaaggcccccagagagaagccctacccatggacacagaggtgtacgagagcccctacgcggaccctgaggagatcaggcccaaggaggtttacctggaccgaaagctgctgacgctggaagacaaagaactgggctctggtaattttggaactgtgaaaaagggctactaccaaatgaaaaaagttgtgaaaaccgtggctgtgaaaatactgaaaaacgaggccaatgaccccgctcttaaagatgagttattagcagaagcaaatgtcatgcagcagctggacaacccgtacatcgtgcgcatgatcgggatatgcgaggccgagtcctggatgctagttatggagatggcagaacttggtcccctcaataagtatttgcagcagaacagacatgtcaaggataagaacatcatagaactggttcatcaggtttccatgggcatgaagtacttggaggagagcaattttgtgcacagagatctggctgcaagaaatgtgttgctagttacccaacattatgccaagatcagtgatttcggactctccaaagcactgcgtgctgatgaaaactactacaaggcccagacccatggaaagtggcctgtcaagtggtacgctccggaatgcatcaactactacaagttctccagcaaaagcgatgtctggagctttggagtgttgatgtgggaagcattctcctatgggcagaagccatatcgagggatgaaaggaagtgaagtcaccgctatgttagagaaaggagagcggatggggtgccctgcagggtgtccaagagagatgtacgatctcatgaatctgtgctggacatacgatgtggaaaacaggcccggattcgcagcagtggaactgcggctgcgcaattactactatgacgtggtgaactaaccgctcccgcacctgtcggtggctgcctttgatcacaggagcaatcacaggaaaatgtatccagaggaattgattgtcagccacctccctctgccagtcgggagagccaggcttggatggaacatgcccacaacttgtcacccaaagcctgtcccaggactcaccctccacaaagcaaaggcagtcccgggagaaaagacggatggcaggatccaaggggctagctggatttgtttgttttcttgtctgtgtgattttcatacaggttatttttacgatctgtttccaaatccctttcatgtctttccacttctctgggtcccggggtgcatttgttactcatcgggcccagggacattgcagagtggcctagagcactctcaccccaagcggccttttccaaatgcccaaggatgccttagcatgtgactcctgaagggaaggcaaaggcagaggaatttggctgcttctacggccatgagactgatccctggccactgaaaagctttcctgacaataaaaatgttttgaggctttaaaaagaaaatcaagtttgaccagtgcagtttctaagcatgtagccagttaaggaaagaaagaaaaaaaaaaaaaaaaaa

SEQ ID NO: 2989 - DNA, 2416 bp, Homo sapiens
ggcctgaggagcgcggaccccggcgctcggctcccggcgccatgtgagggggctcgggggccgcggggggccgggcgctccccgccggagatgaggaaactgaggctcagagaggtcacatggcttgctcgaggccccccagccagtgtgaacccacatccctgcccccagggccacctgcaggacgccgacacctacccctcagcagacgccggagagaaatgagtagcaacaaagagcagcggtcagcagtgttcgtgatcctctttgccctcatcaccatcctcatcctctacagctccaacagtgccaatgaggtcttccattacggctccctgcggggccgtagccgccgacctgtcaacctcaagaagtggagcatcactgacggctatgtccccattctcggcaacaagacactgccctctcggtgccaccagtgtgtgattgtcagcagctccagccacctgctgggcaccaagctgggccctgagatcgagcgggctgagtgtacaatccgcatgaatgatgcacccaccactggctactcagctgatgtgggcaacaagaccacctaccgcgtcgtggcccattccagtgtgttccgcgtgctgaggaggccccaggagtttgtcaaccggacccctgaaaccgtgttcatcttctgggggcccccgagcaagatgcagaagccccagggcagcctcgtgcgtgtgatccagcgagcgggcctggtgttccccaacatggaagcatatgccgtctctcccggccgcatgcggcaatttgacgacctcttccggggtgagacgggcaaggacagggagaagtctcattcgtggttgagcacaggctggtttaccatggtgatcgcggtggagttgtgtgaccacgtgcatgtctatggcatggtcccccccaactactgcagccagcggccccgcctccagcgcatgccctaccactactacgagcccaaggggccggacgaatgtgtcacctacatccagaatgagcacagtcgcaagggcaaccaccaccgcttcatcaccgagaaaagggtcttctcatcgtgggcccagctgtatggcatcaccttctcccacccctcctggacctaggccacccagcctgtgggacctcaggagggtcagaggagaagcagcctccgcccagccgctaggccagggaccatcttctggccaatcaaggcttgctggagtgtctcccagccaatcagggccttgaggaggatgtatcctccagccaatcagggcctggggaatctgttggcgaatcagggatttgggagtctatgtggttaatcaggggtgtctttcttgtgcagtcagggtctgcgcacagtcaatcagggtagagggggtatttctgagtcaatctgaggctaaggacatgtcctttcccatgaggccttggttcagagccccaggaatggaccccccaatcactccccactctgctgggataatggggtcctgtcccaaggagctgggaacttggtgttgccccctcaatttccagcaccagaaagagagattgtgtgggggtagaagctgtctggaggcccggccagagaatttgtggggttgtggaggttgtgggggcggtggggaggtcccagaggtgggaggctggcatccaggtcttggctctgccctgagaccttggacaaacccttccccctctctgggcacccttctgcccacaccagtttccagtgcggagtctgagaccctttccacctcccctacaagtgccctcgggtctgtcctccccgtctggaccctcccagccactatcccttgctggaaggctcagctctttggggggtctggggtgacctccccacctcctggaaaactttagggtatttttgcgcaaactccttcagggttgggggactctgaaggaaacgggacaaaaccttaagctgttttcttagcccctcagccagctgccattagcttggctcttaaagggccaggcctccttttctgccctctagcagggaggttttccaactgttggaggcgcctttggggctgcccctttgtctggagtcactgggggcttccgagggtctccctcgaccctctgtcgtcctgggatggctgtcgggagctgtatcacctgggttctgtcccctggctctgtatcaggcactttattaaagctgggcctcagtggggtgtgtttgtctcctgctcttctggagcctggaaggaaagggcttcaggaggaggctgtgaggctggagggaccagatggaggaggccagcagctagccattgcacactggggtgatgggtgggggcggtgactgccccagacttggttttgtaatgatttgtacaggaataaacacacctacgctccgaaaaaaaaaaaaaaaaaa

SEQ ID NO: 2990 - DNA, 7163 bp, Homo sapiens
tgaccctgaggcattgccgtcgcgcggtgcacagctaagacgtcgcgcttgcgcaggcgctcggcgcagaggcctgcgggaagccaagatggcgcataggggttctccaggctgcagttggcgccttatcagtatctaagcggagtgttttggaaggagttaaggggctgtggcaaacgccctctccgccgtcatggcccggcatcggaatgttcgaggctataactacgatgaagattttgaagatgatgatctctacggccagtctgtagaggatgattattgtatttcgccgtcaacagctgctcagtttatttattcacggcgtgacaaaccttccgttgagcctgtggaagaatatgattatgaagatctgaaagaatcttccaattctgtttcaaaccatcagctcagtggatttgatcaagctcgtctttattcatgccttgatcacatgagagaggtacttggagatgctgtgccagatgaaatattaattgaagcagttctgaagaacaagtttgatgtgcagaaggctttgtcaggggttctggaacaagatagagtgcagagtttgaaggacaagaatgaggcaacagtatctacaggaaagatagcaaaaggaaaaccagtagattcccagacatcgcgaagtgaatctgaaattgtgccaaaagttgctaaaatgactgtatctggaaagaagcaaactatgggatttgaagtgcctggagtatcttctgaagaaaatggtcatagtttccacacacctcaaaaaggaccgcccattgaagatgccattgcttcttccgatgttcttgagactgcttctaaatctgctaatccaccccacacgattcaagcatcagaagagcagagttcaaccccagcaccggtgaaaaagtctggcaagctgaggcagcaaatagatgtgaaggcggaactggagaagcggcaaggagggaagcagctactcaacttagtggtcattggtcatgttgatgctgggaaaagtactctgatgggccatatgctttatcttctgggtaatataaacaaaagaactatgcataagtatgaacaggagtctaaaaaggctggcaaagcttcgtttgcatatgcatgggtcttggatgaaactggcgaagaaagggaaaggggagtaaccatggatgttggtatgacaaagtttgaaaccacaaccaaagttattacattaatggatgctccaggccataaggacttcattccaaatatgattacaggagcagcccaggcggatgtagctgttttagttgtagatgccagcaggggagagtttgaagctggatttgagactggaggacaaacacgagagcatggactcttggtccgttctctgggagtgacgcagcttgcagttgcagttaataaaatggatcaggttaattggcaacaagaaaggtttcaagagattactggaaaacttgggcactttcttaagcaagcaggttttaaggagagtgatgtaggttttattcctacaagtggtctcagtggtgaaaatctaatcacaagatctcagtcaagtgaactcacaaaatggtataaaggactatgtttattagaacaaattgattcctttaagcctccccagcgatctattgacaaaccttttagattatgtgtgtccgatgttttcaaagatcaaggatctggattttgcataactggtaaaatagaagctggttatatccaaactggtgaccgactactggcaatgcctcctaatgaaacttgtaccgtgaaaggaatcactctgcatgatgaacctgtcgactgggcggcagcaggcgatcatgttagtcttactttggttgggatggatatcatcaaaatcaatgttggctgcatattttgtggccccaaagtacccattaaagcttgcactcgtttcagagcccgaatcctcatctttaatattgaaattcctatcactaaaggatttcctgtgctgttacactaccaaactgtcagtgaacccgccgttattaaacgattgattagtgtcttaaacaaaagcacgggtgaagtcacaaagaaaaagcctaagtttttgactaaaggccagaatgcattggtagagctacagacacaaagaccaatagctcttgagctatataaagactttaaagagctggggaggttcatgctacgttacggtggttctacaatagctgctggtgttgtcactgagataaaagaatgatgggtcagaatttctaccacgtttctggatacagtgaaatagctaacctctgtttcaagaatgcagttattaagtcaaaggaacaatgtgcaattgatatgtttttagatgagagagaaaaattaaagctaaaattagctgcaaagaagtattaataatcacctctgcaaaaattctaagttgccaactggcaaagaaagtctaatgttaaaaacaactttgcctttgaaacgttaataaatggatttactttgctaagatttatggcaagtgtcaaaaatagtatctgaagatactgaatcatcatgaaatgaactctacttctggccaaagcacaatgtatttgcagttttctcttttgattcaattatactgcacatgttttaaggaaaagtaacttaattgggtttttcaggcagttgatatttgacctaagcttttttttttttttttttttccagttaatgctaagaaaagatttggggaaggttataataaaagtattttgtggtgaccataagaatgtccctccccaaaacaagtaaacttgtgaaagtttaatttggaattagtggaagctgttcctttgaaagccaagatattatttaagttgtaaagccagctaataaaatgccttagtttgagcataatacaaactgtgttttgttctttagacatttatgagattctctgccactaacagtaaatatgatttaggggttttgtgggatctttttcacctaagagtttcctagctctgtcacatgaattcttttttatcctaatggcagatccaatttcatctcattcatttttttaaccataacttgcttttcccattctcacttttagaattatacctatgatggccctttctttatcttgcttaccttatagattataagtcccctgtgagtaagtaagagtcatgtttttctttaaagtttcaacaacaaaccccaaggtttatttatttaacaacaggtattcgttgaggtgccttctgggtgcaaggagctttagagtagattttgacctcagctgaacctggaactctgatctgatagactgtttatgataagcttttttttttattagcagcgtgatttgtatatcgatggcttaacatatacaacagcatttcttctccctgcaccttttcgtgaacctgacattttgaacataagcaataacatctgtatggtaaagtaggcagattatacatgtgttgcttagtgaatgattaccaagtgaacacacttggtatattgctttaccaaaatacatgtgtagttgtcacttcagattcactgagttaagaaagttttatttaaatattaatattaatcaagaatttaacagatatatgtgacagaaatctaacttcaagtgactgaagcagaaagaaaaatttttgaatgacataactgagaaaattagaggtagctctagctttgattccatttagatcgagcagctcacacaatgttagcaaggactcatctccactctgccttccctggtgctggttttgctctcaaactctatatagaactctcggccgggcgcggtggctcacacctgtaatcaaaacactttgggaggctgagtcgggaggatagcgtgagcccaggagtttgagaccagctaaggcaatatagtgagaccatgtctctacagaaaaaatttaaaaacagatcagctgggtgtggtgccacatgcctgtagtcccagcttctcaggaggctggggtgggaagatcacttgagcccaggaggtcgaggctgcagtgagccatgatcacatcactgcagtccagcctgggtgacagagcaagacctgtcaccctgccacccataaaaaacctcttctgtaatgccaggttcttgacaagatgtgataattccacacttacatcctcagatctcccatccagggcaaggacagactaaaagagcatatcttctccagaagtcctagaaacatctcatcattgactatgattgaattttatttattaatacttccctaggatatcctgtgtttgagtgtgaagttaatatcacacaaagcatgtagctaacagttgtgtgagggttggaaattcagggtgctgttaggaaggggaaatggattggggtttaaggtagggggagtaaaaacaagaaaccatccactctgtatattatataagactgtgatcgaattaagaattttagtttacagtttagcataaacaaatagtagtagaaatgaatgcatttattcattccttccttctccaatagtgtttaagtacaatctttttatttgcattttattgatgattgattgtggttgaaaggagtggtgatattatttcgaggatccactgtgtaagaagactgttggcagtggaaggctcgagttgattaagtgacaaagaggtaaagcagacatgcccaagcttggttatgctctgatttcctaccctgttactttcatccataatttatagtacatccattttgtgtcattttgcttcaggtatttcttgtcctgactgtcttcttttttatgattttactgtttcttcacactaatggctttgtcctctgactttgactctttgtgagattcttctgagcagttaacctctaggataatgtggcttgaacacattacagaactatgttttgacttgttagtattattcacacattcatgacaattgagcctctctactgtgagaaatgttttagaggccagtttctaggcatagctgtttttctcccatgagtatgcaaatcaatagttttaaccattgttaaaatgcaatcatagtgacttcagaaaatttggaaaatacagaaaatatagggaagaataaaattaacccacagttctgtcacctaaaggtaactgctgccaatgttttcatgtatttcttttctgtctctccaatgcatttttttacatagttgtgagcgttagccaagttattttcatgttgttatgtaatcaatatttttcaatagaagtattagaggttttttttattgatataaaaataacaattacagatcctgatatatagaagttattcaaaattatacagttttcaaaaaatcaagacaagtaggcccaatacaaactactgaatcatcttctaatttccctctaaaatatttatagaaatatgtaagtagaaaaacattcatcctttcctcgtctaattatgatcctgccatattccaggcacaagagaaagctctggggcttgagtcttaatagggctgatagtccaaccaggggacagggtatcataaagagataattcaaaactttaagattggagggtaggtgatggtagaaaattctgcggcaaacatttgttgatgctcatcatttgttgatgtcatcaaagatcaccagggcataattataatcaaaattagttttattgatgcttgctgcagcaagagagactgcacaccactggggtctatgggtgcttctcagtgggaaggtgtaaggaggggcttgctaagaatttgagcacatgtagctaattttaaggagggctcaagtgagcaagggtttcttctggattgagtgctgtcagaaagtggattgagtgctgtcagaaagtgggagtgattttgcaactgggtatcttaatttttatgttgtgggtgggaggaaaggaaagaagcaacagtcacccatgttagccacaagaagaggttggctgtttatggtttgcacagtgactttgtttttatctgtgctcaggcatgattacagtatctcattttatccggattacagtgacctcatctgatgttagagatttgagaattgttaaatgttcagcaggagaacgccaccgcctagtgtgaatgctaggtcagaagctgctttttcacactgaaaccatttaagtatgtacaaataagttaatagtgtaaatgtaggtgtaaaatacaatgcaaaacaaaataatgaagtaagtgaattaaattattgcaccaaatatggggatatgaaatagggaaagaaaagcattaagttacttatagtccataaagggactacattattttgttactctgataatcccataaaacaaagttttaagaatgtttacagtaaccatgaatggaattagtgaaactattcatatcaatgcaaaaaaaaaaaaaaaaaaaagcaaagaaactaagtctgtacagcaaaagatggtaaggaaacaagaaaattaaatgaagacaaaggttgtgattattacagtaaatgaaaataggtttttatctttaaaatgtagactcaaactgcaaagctaatgatatgctatctgcaaaatattcctattttgtaaataaataaaaccatagatttaaagaagaaagggcacagatgtactggggagacaaaaataactgatccgttgggtgtataccatgtgccaagcaattttcatatactcatttaacatgacatatctataattatatgaggcagatattattaacctcagtctatagatgagaagactaaagctcagagggattgctaaaaactagtaaataaattatggaaccatgatttgaatttagatttaagtctgactgaggcatgttcaaagacactacactgcctctccagaaatcaggagtagcaatattaacactggacaaagaatttaaagcaagtaaaaaaaaattaagagaatttcatattaataacaagtataatgcacaataaaactgtaccaaatgacataaaaatgcataatgaaatttattagaaattaaaaattaaagggcatagttacaattattgaggaattctcatagctctgccttatagatcatgtaaacaaacaaggtcatagaggacttaaatagcaaagcagaaaaaaaaaaaaaaaaaa

SEQ ID NO: 2991 - DNA, 2091 bp, Homo sapiens
gtgacgggtccgcgaggcccagctcgcgcagtcgttcgggtgagcgaagatggcggccgagagggaacctcctccgctgggggacgggaagcccaccgactttgaggatctggaggacggagaggacctgttcaccagcactgtctccaccctagagtcaagtccatcatctccagaaccagctagtcttcctgcagaagatattagtgcaaactccaatggcccaaaacccacagaagttgtattagatgatgacagagaagatctttttgcagaagccacagaagaagtttctttggacagccctgaaagggaacctatcctatcctcggaaccttctcctgcagtcacacctgtcactcctactacactcattgctcctagaattgaatcaaagagtatgtctgctcccgtgatctttgatagatccagggaagagattgaagaagaagcaaatggagacatttttgacatagaaattggtgtatcagatccagaaaaagttggtgatggcatgaatgcctatatggcatatagagtaacaacaaagacatctctttccatgttcagtaagagtgaattttcagtgaaaagaagattcagcgactttcttggtttgcacagcaaattagcaagcaaatatttacatgttggttatattgtgccaccagctccagaaaagagtatagtagggatgaccaaggtcaaagtgggtaaagaagactcatcatccactgagtttgtagaaaaacggagagcagctcttgaaaggtatcttcaaagaacagtaaaacatccaactttactacaggatcctgatttaaggcagttcttggaaagttcagagctgcctagagcagttaatacacaggctctgagtggagcaggaatattgaggatggtgaacaaggctgccgacgctgtcaacaaaatgacaatcaagatgaatgaatcggatgcatggtttgaagaaaagcagcagcaatttgagaatctggatcagcaacttaggaaacttcatgtcagtgttgaagccttggtctgtcatagaaaagaactttcagccaacacagctgcctttgctaaaagtgctgccatgttaggtaattctgaggatcatactgctttatctagagctttgtctcagcttgcagaggttgaggagaagatagaccagttacatcaagaacaagcttttgctgacttttatatgttttcagaactacttagtgactacattcgtcttattgctgcagtgaaaggtgtgtttgaccatcgaatgaagtgctggcagaaatgggaagatgctcaaattactttgctcaaaaaacgtgaagctgaagcaaaaatgatggttgctaacaaaccagataaaatacagcaagctaaaaatgaaataagagagtgggaggcgaaagtgcaacaaggggaaagagattttgaacagatatctaaaacgattcgaaaagaagtgggaagatttgagaaagaacgagtgaaggattttaaaaccgttatcatcaagtacttagaatcactagttcaaacacaacaacagctgataaaatactgggaagcattcctacctgaagccaaagccattgcctagcaataagattgttgccgttaagaagaccttggatgttgttccagttatgctggattccacagtgaaatcatttaaaaccatctaaataaaccactatatattttatgaattacatgtggttttatatacacacacacacacacacacacacacacacacacactctgacattttattacaagctgcatgtcctgaccctctttgaattaagtggactgtggcatgacattctgcaatactttgctgaattgaacactattgtgtcttaaatacttgcactaaatagtgcactgcaagaccagaaaattttacaatattttttctttacaatatgttctgtagtatgtttaccctctttatgaagtgaattaccaatgctttgaataatgttcacttatacattcctgtacagaaattacgattttgtgattacagtaataaaatgatattccttgtgaaaaaaaaaaaaaaaaaaaaaaaaa

SEQ ID NO: 2992 - DNA, 5875 bp, Homo sapiens
ggagccgcggcggcgggcagcgcgggacccagtactatggctgtgtactgctatgcgctcaatagcctggtgatcatgaatagcgccaacgagatgaagagcggcggcggcccggggcccagtggcagcgagacgcccccgcccccgaggagggcagtgctgagccccggcagcgttttcagccccgggagaggcgcctctttcctcttccccccagccgagtcgctgtcccccgaggagccccggagccccgggggctggcggagcggccggcgcaggctgaatagtagcagcggcagtggcagcggcagcagcggcagtagcgtgagcagcccaagttgggctggtcgcctgcgaggggaccggcagcaggtggtggcagccggtaccctctccccgccagggccggaggaggccaagaggaagctgcggatcttgcagcgcgagttgcagaacgtgcaggtgaaccagaaagtgggcatgtttgaggcgcacatccaggcacagagctccgccattcaagcgccccgcagcccgcgtttgggcagggctcgctcgccctccccgtgccccttccgcagcagcagtcagccccctggaagggtcctggttcagggcgcccggagcgaggaacggaggacaaagtcctggggggagcaatgtccagagacttcaggaaccgactccgggaggaaaggagggcccagcctatgctcctcgcaggtgaagaaaggaatgccacctcttcccggccgggctgcccctacaggatcagaggctcagggtccatccgcttttgtaaggatggagaagggtatccctgccagtccccgctgtggctcacccacagctatggaaattgacaaaaggggctctcctaccccgggaactcggagctgcctagctccctcattggggctgttcggagctagcttaacgatggccacggaagtggcagcgagagttacatccactgggccacaccgtccacaggatcttgccctcactgagccgtctgggagagcccgtgagcttgaggacctgcagcccccagaggccctggtggagaggcaggggcagtttctgggcagtgagacaagcccagccccagaaaggggcgggccccgcgatggagaaccccctgggaagatggggaaaggatatctgccctgtggcatgccgggctctggggagcctgaagtgggcaaaaggccagaggagacgactgtgagcgtgcaaagcgcagagtcctctgattccctgagctggtccaggctgcccagggccctggcctccgtaggccctgaggaggcccgaagtggggcccccgtgggcggggggcgttggcagctctccgacagagtggagggagggtccccaacgctgggcttgcttgggggcagcccctcagcacagccggggaccgggaatgtggaggcgggaattccttctggcagaatgctggagcctttgccctgttgggacgctgcgaaagatctgaaagaacctcagtgccctcctggggacagggtgggtgtgcagcctgggaactccagggtttggcagggcaccatggagaaagccggtttggcttggacgcgtggcacaggggtgcaatcagaggggacttgggaaagccagcggcaggacagtgatgccctcccaagtccggagctgctaccccaagatcaggacaagcctttcctgaggaaggcctgcagccccagcaacatacctgctgtcatcattacagacatgggcacccaggaggatggggccttggaggagacgcagggaagccctcggggcaacctgcccctgaggaaactgtcctcttcctcggcctcctccacgggcttctcctcatcctacgaagactcagaggaggacatctccagtgaccctgagcgcaccctggaccccaactcagccttcctgcataccctggaccagcagaaacctagagtgagcaaatcatggaggaagataaaaaacatggtgcactggtctcccttcgtcatgtccttcaagaagaagtacccctggatccagctggcaggacacgcagggagtttcaaggcagctgccaatggcaggatcctgaagaagcactgtgagtcagagcagcgctgcctggaccggctgatggtggatgtgctgaggcccttcgtacctgcctaccatggggatgtggtgaaggacggggagcgctacaaccagatggacgacctgctggccgacttcgactcgccctgtgtgatggactgcaagatgggaatcaggacctacctggaggaggagctcacgaaggcccggaagaagcccagcctgcggaaggacatgtaccagaagatgatcgaggtggaccccgaggcccccaccgaggaggaaaaagcacagcgggctgtgaccaagccacggtacatgcagtggcgggagaccatcagctccacggccaccctggggttcaggatcgagggaatcaagaaagaagacggcaccgtgaaccgggacttcaagaagaccaaaacgagggagcaggtcaccgaggccttcagagagttcactaaaggaaaccataacatcctgatcgcctatcgggaccggctgaaggccattcgaaccactctagaagtttctcccttcttcaagtgccacgaggtcattggcagctccctcctcttcatccacgacaagaaggaacaggccaaagtgtggatgatcgactttgggaaaaccacgcccctgcctgagggccagaccctgcagcatgacgtcccctggcaggaggggaaccgggaggatggctacctctcggggctcaataacctcgtcgacatcctgaccgagatgtcccaggatgccccactcgcctgagctgcccacgccctccctggcccccgcctgggcctcctttcctcctcctgtgcttcctttctcgttcctaacttttccttcacttacacctgactgaccctcctgaactgcactacaagacactttgtagaagaggagatgagagtttctagtcattttcctaacttcagggcttggaggtggtgtttgcactgctttttgtagagagggtcacctactagaagagaaatgcccagtcttagaggtgggtcaggtgtagagctggagggggtccctggctgctgaggggaccctaccagatgagccctgcctctgggagccccctaggaagcaccagcctggacctaccacctgcggaggcctgctgccccctggcggccagtgctgttagagtgctgccaagcacagccttatttctgccggggcctccccaccggagagcccagggggccggccgggttcctggtccctggctgggagcagggctttctggtagttggggcacaaaaccatcggggaaccacatgttgactgtgagcaaagtgtcttccgattagcagcctcagggatgccctggtggcctctccagggctgctcaggcaaggccccccacccatctggtatggaaacctgccggctccaggccagacccaggagccaagagaaggctgaagccagcttggctgtgttctctgatctaggccttcccagaggaggcgagcagaagctgtgccacttggaattgcaacccatgagttcagaaggcacactctgccatgctgagctccaagggtgctaccaggggaagatgggatctatagagtctctgggccctggccccagggaggagcacatttttcttgaccctcacctacctggtgctagttggtcaaccctgcctgcatacatgggctcctgtcatggggcccagagtcccttgcagatatagaaataggggaggagctcaggtctgcgccaggcaggaagaaggcaggcttctggcttccagaggtgccgcggtggcctcctggcatcatttgttattgcctctgaaacaagccttactgcctggagggcttagattcctgcttctccaatgtagtgtgggtatcttgtagggtatgtggtggatgccagggcgtgctccaggcacctcttcctgaagtctctgcatttggagattcgtggagaacctatttaagcccaattttaactgaaagccagtgagtctgatatggaagggaatgtaaaatttgcctgacttcttaagaacaaaacccccagctctgtgccccatgctccttggggcttgccacccactcctttgctgtcagaggtacaggagctgggagagtccaggagctagggacacagagggagactatggaccaaggtgtgtgtgtctggaggaaccactgcccaccccaccaccccggggtctctggggaactgtcaacctgcccacgggacatgtacatttccccttttgtgctggaagtgtgagtgacacttgctgggggtggagggtgggacacatgaggatgtataagtacagattttaaaaaaggaaatcaacttacacttcctggctcttgtttaaaacagtggtgagctcctgtgtgggccgacttgctaaaggtcacacacgcgcccggtggagcacgagagacctcgtggcagcatgtgatctggaaggcaggcaggacgggggcgttggggagccaaagtcaactctgggcctctggagctatagtgacttttgggctagaagggaccctggtggtctgtgcttcagccatttgcagggcaggggcatcattaattcagacgtaaagattctatgaatatggactggccaaaagttatccttactccatctgtgaaagaagtttgctaaagcaaatcatgatatgaacaaaaattacaggggacctgtttaagagaacaaaatgttccaagcactttaggcagacaccagctgtttgcaaacaatgtgctaatatgcaaatgatgtgcttattaaaggaggcccatggggcctcttattggcaatacttggctgtgggttacattaaatatgtgaacatagtatgaagtagcatcattttagggttattctgttacttagggtttttgttttctgttttttttttctctttttttgtatttaccgtgctagttctcttctacacctactctgtctctcaagccattttgccactcgcttccctgccatctggcccttccctttgtctcagtgggatagatggattgtgaaatggaatctcccagaacccctgccctggcagcctggaagaccgtgcctgcccagccctcgtcaccacagggactccttgggtcctggcagtgcatgtgccagcaggcaggacaaactctgtgtacctgtgcccaggtgaatgggcgcagggtcctcttgccctgtcctgcggggggccccacgagttcctggcattcagcactgcttagcattctcggaaggtttcttcaactgcttgcttttcccaggcttgcctttagtgtcatgtaagacatttttaagttatatttattttgttgggttttaaaattgcacagaacactaagaccgaaaggctggactcttgtttctccttgaaagctttgcctttgttttgaacttcctttcccacttggtagaaagagcccagaagcagccctggccctgtaagatggactctttcatccttcagttgtatttagctttgagtttctctgcatctgtccaccccatgtgtatataacccagcccctggctctggggtggtcacctcgtcagtgccttttgttctggaggagaggaccccccccgcctgccgagaggctctcttcctgttctgcacccctctccccatgggaccttggagaaaactgaactgttacaaacccctgcacagtgcctgtcaaacagatgcaaaccttcctgaataaagccttggagaccaaaaaaaaaaaaaaaaaa

SEQ ID NO: 2993 - DNA, 2184 bp, Homo sapiens
ggcggaagtcggttcccgtgacgcggcgcgccccaagggccggctccgttgagggaagggagcccgcccggtggcggctggggtcggctgctgggaggaggtggtgggctggttcggacgtgggtcgaggctgtagcaggactccaggtgaggcctgaggaccactctgccctcccgcggcccgggctcgcgccgggggccatttaatcccgacagcttgcggcctgacgtcgctgcggcctggcagtgaccacgtcggcgtccggcccctcggccggcgatagagttgcggctaaaatgaaaggacgcccagttacatttgcatcgtagataaagaaagagcatttagtataagcatgtccgaaatgttgcgtgggatgtaggcatactaaaaccttattcgtggcctgtctgaaatccaaatggagctgggtattctgtgtttttatttgctaaatctggcagccgtacccgcggccccgggcagggagggagcagctgggctcggccagaccctgccggcgtctggggggcctgcgaagtggaggggagacgggcagccgggcagtggccggcgttccccggagctcggaccggttggattggactccgacgctaccgctccctctgctgaactattccggatgtaaaacactagggatcggagtttttcttggttttttaatctcattctagtgaccgagaagcttgctggcagtgcgctgatggatctgtgtgaataggccatttatttgacctcttcagtaacactgttctaaccggctgaaactgctttcttaggcattttcttaaaagcttggtggttaagagcacggaatttcgagtcagatttccaatcttggctctatcactatcctcggagtcatggggcagtcacatcatccctgtctctgtaatggtagctgcccctggataagtgttattaggtgattcagaagggtgggctgttgcccttgcctgaggttgcagtctgcggttcccaagccccaagacccgcctcagaactaactgcatttgcttttgactcctggcctttctctagggttgggaagaacatggaaagtgacctccctgccaaataactcagaagaggagtgtcggtagccaaatgtttcttcagaatacgtgtaaaagaaatgtttttcttccatctaggaagatgttaccgagtacttcagtgaattccttagtgcaggggaacggagtcttgaattccagggatgcggcaagacacacagccggagcgaaacgctacaaatatctgagaaggcttttccgctttcggcaaatggactttgaatttgctgcctggcagatgctctacctgttcacatccccacagagagtttacagaaattttcattatcgaaaacagacgaaggaccagtgggccagagatgaccctgctttcttggtcctgttaagtatctggctctgtgtgtccactataggatttggctttgtgctggacatgggattctttgagacaataaagcttctcctttgggttgtactcatagattgtgtaggcgttggtcttctgatagcaactttaatgtggttcatctctaacaagtatttagtgaaacgacagagcagagactatgatgtggaatggggctatgcttttgatgtgcatctcaatgctttttatccactcctggtcattttgcattttatccagctttttttcatcaaccatgttatcctgacagacacatttattggatatttagttggaaataccttatggttggttgcagttggctattatatctatgtaactttcctgggatacagtgcattgccatttttgaaaaatacagtaattcttctgtatccatttgcacctctgattctgctctacgggctttccctggcactgggatggaacttcacccatactctctgttctttctataagtacagagtgaaataaaaagtgagaagaagattcaatcgtaactgtgtcaacagtattgtgaagtgatcatttcttgtaaaacttgtaaataaactatcatctttgtagatatcttaaaggtgtaaagtttgcaaatttgaagaaatatatattaacactgtggtcaggtacattccttaaaactaattaaatgtacatttctataataaatattttttaaactaaaaaaaaaaaaaaaa

SEQ ID NO: 2994 - DNA, 4187 bp, Homo sapiens
ggcggcgcaggggcggggctttacggacgcaagcacgtcgaagcgctgctcctggagccgcggagggtgcgggtttggctgcggtggtttctgtggcggttgctgtggcggagtttggaggttggagagaaatccaggtactcactagactggtaccttctgccaccatgggggagcttttccggagtgaagaaatgacactggcccagctttttctacagtcagaggctgcttattgttgtgtcagtgaattaggagaacttggaaaggttcagtttcgtgacttaaatccagatgtgaatgttttccaacggaaatttgtgaatgaagttagaagatgtgaagaaatggatcgaaagcttcgatttgttgagaaagagataagaaaagctaacattccgattatggacaccggtgaaaacccagaggttcccttcccccgggacatgattgacttagaggccaattttgagaagattgaaaatgaactgaaggaaatcaacacaaaccaggaagctctgaagagaaacttcctggaactgaccgaattaaaatttatacttcgcaaaactcagcaattttttgatgagatggcggatccagacttgttggaagagtcctcatccctcttggagccaagtgagatgggaagaggcactcctttaagacttggcttcgtggctggtgtcattaaccgggagcgcatccctacttttgagcgcatgctttggcgggtatgccggggaaatgtgttcctgcgacaggctgaaatcgagaaccccctggaggatcctgtgactggcgactacgtgcacaagtctgtgtttatcattttcttccaaggcgatcagctgaaaaacagagtcaagaaaatctgtgaagggttccgagcctcactctatccctgtcctgagacaccacaggagaggaaggaaatggcttctggagtgaataccaggattgatgatctccaaatggttctgaatcaaacggaggatcaccgccagagggttctgcaggcagctgctaagaacatccgtgtctggttcatcaaagtgcggaagatgaaggccatctatcacaccctgaacctgtgcaacatagatgtgactcagaaatgcttgattgcagaggtctggtgccctgtcaccgaccttgactccatccagtttgcactcagaaggggcacggaacacagtggttccactgtaccttccattttgaacaggatgcagacaaaccagactcccccaacctataacaaaaccaacaagtttacctatggctttcagaacatagtagatgcttatggaattggaacttaccgagagataaatccagctccgtatactattatcacgttcccttttctatttgctgtgatgtttggagacttcggtcatggcattttaatgaccctttttgctgtgtggatggtactgagggagagccggatcctttcccagaagaatgagaatgagatgtttagcactgtgttcagtggtcgatacattattttattgatgggtgtgttctccatgtacactggcctcatctacaatgattgcttttccaagtctcttaatatctttgggtcatcctggagtgtacggccgatgtttacttataattggactgaagagacgcttcgggggaaccctgttctacagctgaacccagccctccctggagtgtttggtggaccatacccttttggcattgatccaatttggaacattgctaccaataaactgacgttcttgaactcctttaagatgaagatgtctgttatccttggtatcatccatatgctgtttggagtcagcctgagtctgttcaaccatatctatttcaagaagcccctgaatatctactttggatttattcctgaaataatcttcatgacctctttgtttggctatttggttatccttattttttacaagtggacggcctatgatgctcatacctctgagaatgcaccaagccttctgatccatttcataaacatgttcctcttttcctacccagagtctggttattcaatgttgtattctggacagaaaggaattcagtgtttcctggtagtggttgcactactgtgtgtaccttggatgctgctgtttaaaccattggtccttcgccgtcagtatttgaggagaaagcatttgggaactctcaactttggtgggatcagggtgggcaacggaccgacagaggaggatgctgagattattcagcatgaccagctctccacccactcagaggacgcagacgagtttgactttggggacaccatggtccaccaggccatccacaccatcgagtactgcctgggctgcatctccaacactgcctcctacttgcggctctgggccctcagcctcgctcatgcgcagctgtctgaggtgctttggaccatggtgatccacatcggcctgagcgtgaagagcttggcgggaggtttggtgctgttcttcttcttcactgcctttgccaccctgaccgtggccatcctcctgatcatggagggcctctcggcctttctccacgcactgcgcttacactgggttgagttccagaataaattctacagcgggaccggtttcaagttcttacccttctccttcgagcatattcgggaagggaagtttgaagagtgagtccctgtgagggccgtgtgccccatgctaccctccccgcctccctccacagtgatcagctgtgcctctctgcctgttggttgtgatctgtgggcaccagctcattcgtgtcaccctgtctgtgagtcatttagatagaatagtcctccttgggtctcccaccacccctagctttgtgtgtagtgtagtgattttctggctgtcactcatactcactgggcaccagccttgccctcttagcctccatccatccagacagcccttcccacctcctggtggtgagccagtctgcattcccacgccatcccaaagccctttcatcttccccgtgcattgtagatggaaggagcacccatgccattcacatctagactttgagttccctgcatctgccaccgtagtttctagcaggagtagtggggggagtaatacagattcttccctagaaggggacactggtaacatgtcccactcttggattagcaggggtgggtccaggaagatgatatttgcgtcttttgcccacccccctggcattcagctggacccaactaggccatcatgagtggcttctccctgtcatccccaggggtcataggatatctacaccgcctttctgaccccaccctgcactcccatcctttcctctctccccgttcatgccctgcactacatagcacagccgggatgcttggaacagaggccttggctgctccgcagtgcacagggcttccctctctcggggttggcttcttcccaggccttgcatgggccctgcccacaagcacaccctcaggccgagggtgcagactgatgctcttccctgatggagaccctgagatcttccccacccccaatcatgatgtcttcagtgtgggactggggtcctcttggttctgcctgcagcctgcctggctccgcccctagtgccccctcctcaccacactggccccaggtctcaggaggggtgtcctgggcagggaaggtcagtgtcactgatggtttgctgtttggaagccattggcagggctgccgtgcatgtggctgtgagggctgcacagtcctgccaaggggcttcctccttgtcaccccgaaccttgtaatcgtgtgctggcgtggcagccctggctaagttaatccccaccgctttcagtggtagaaagaattccctgagtgggccaggctggtgccctcctcctaccctggcttttctgagtgagctgcctggagccctcatcccctctcccaggctgggctggccctgggcggggccactgtgtgctggcccactgtgacctgacccgaccttgtgcagcccccctgccctggtgtcctgggttttcgtgatgatctttgctctgtttccagtggggtttgaagcagagttcagggaaccctgcccaaggtcctcctgttcagacattcctatgttgaataaagtatgtttgacttccccggaaaaaaaaaaaaaaaaaaaaaaaaaaaaaaaaaaaaaaaaaaaaaaaaaaaaaaaaaaaaaaaaaa

SEQ ID NO: 2995 - DNA, 4319 bp, Homo sapiens
ggaccccaaaaagaagagagctcagaagccctcccacatgagaagaaacatacgaaagctactccgggaggatcaattggagcctgttaccaaagcagcacagcaagaagagttggaaagaaggaagcgcctggagcagcagaggaaagattatgcagcccctattcctactgttccgctggagttcctccctgaggaaattgctttaagggcaagtgacggtccccaactgcctcctcgggtcttggcccaggaagtcatttgtttggacagtagcagtggcagtgaggatgaaaaaagcagtcgagatgaggtgattgaactgagctctggagaggaggacactctgcacattgtggacagcagtgaatctgtcagtgaagatgatgaggaagaagagaagggtggcacccatgtcaatgatgtcttaaaccagcgtgacgcccttgggcgggtctttgtcaacctaaaccaccctccagaggaggaaaatgtcttccttgccccacagttggcacgggctgtgaaacctcatcagattggcgggatccggttcctttacgataacctagtggagtctctggagaggtttaagaccagcagtggctttggctgtattctggcccacagcatgggtctggggaaaactttgcaagtgatctctttcatcgacgtcctcttccgccacacgccagccaaaacagtccttgccattgtgccggttaatactcttcagaattggctggcagagttcaacatgtggcttccacctcctgaagccctcccggctgacaacaagcctgaagaagtccagcctcggttctttaaagttcacatcttgaatgatgagcacaagacgatggcatctcgtgctaaagtgatggctgattgggtgtcagagggtggcgtgctgctgatggggtacgagatgtacagactcctcactctgaagaaatcatttgccacaggtagaccgaagaaaaccaagaagcgttctcacccagtcatcattgatctagatgaggaagatcggcagcaggagtttcggagagagtttgagaaggctttatgccgccctggccctgatgtagtaatctgtgatgagggacaccgcatcaaaaactgccaggccagcacctcacaggctctgaagaatatccgctctcgccgccgggtggtgctgactgggtaccctctgcaaaacaacctcattgagtactggtgcatggtggactttgtgcgcccagacttccttggcacccggcaggagttcagcaacatgtttgaacgccctatcctgaatgggcaatgtattgacagcacacctcaggacgtccgcctcatgcggtaccggagccatgtcctgcacagtcttctggagggctttgtgcagaggagaggccacactgtgctgaagattcatctccctgccaaggaagaaaatgtgatccttgtgcggctctccaagatccagcgagatttgtatacacagttcatggatcgcttccgggactgtggtagcagcggttggctggggctgaacccccttaaggcattctgtgtgtgttgcaagatctggaatcaccctgatgtgctgtatgaagcccttcagaaggagagcttggccaatgagcaggacctagacgtggaagaacttggctctgcagggaccagtgcccgctgtccaccacagggaacaaaaggcaagggagaggatagcaccttggcttcctcgatgggagaggcaaccaatagcaagttcctacagggcgttggcttcaaccctttccaggagcgaggcaacaacattgtcacatatgaatgggccaaggaccttctgactaattaccagactggagtcctagaaaactctcccaagatggtactgcttttccacctgattgaggaaagtgtgaagcttggggacaagatccttgtgtttagccagagtctttccaccttggctctcatcgaggaattccttggaaaacgagaagtaccctgtccacctggtaccgaggggcaaggagcacagaagtgggttcgaaacatcagctacttccggctagatggtagcacccctgcctttgagagggagcggcttattaatcagttcaatgatcccagcaacctcaccacctggctgttccttctctctacaagggccggatgcttgggtgtgaatctgattggtgccaaccgagtggtggtgtttgatgcttcctggaacccttgccatgatgcccaggcagtatgtcgggtataccgttatggccagaaaaagccctgttacatctatcgccttgtggctgattacactctagaaaagaagatctatgaccgtcagatttccaagcagggcatgtcagatcgggtggtggatgatctaaatccaatgctgaacttcacacggaaagaggtggaaaacctactgcactttgttgagaaggagccagctccccaagtttccttgaacgtaaaggggatcaaggagtcagtcctgcaactggcctgtctgaagtaccctcacctcatcaccaaggagcctttcgagcatgagtcattgctcttgaaccgaaaggatcacaagctaaccaaggctgagaaaaaagcagcaaagaaaagctatgaggaagacaaacgcacatcagtcccctatacccgcccatcgtatgcgcagtattaccctgccagcgatcagagcctgaccagcatccccgccttcagccagagaaactggcagccaactttgaagggtgatgaaaagcctgtggccagtgttcgtcctgtgcagtccacccccatccccatgatgccccggcatgtcccattgggaggaagtgtaagctctgcctccagcacaaatccatccatgaactttcccatcaactacttgcagcgtgcaggagtccttgtgcagaaggtggtcaccacgacagatattgttattcctggactcaacagctccacagatgtacaggcaagaattaatgctggtgagagcatccacatcatccgtgggacaaaagggacgtacatccgtaccagtgatggacggatctttgctgtccgggcaactggcaaaccaaaggttcctgaagatggtcggatggctgcctcaggttcccagggaccttcttgcgagtccacaagcaacggcagacacagtgcctcatcacccaaagcccccgaccctgaggggctggccaggcccgtctctcctgacagcccagagatcatcagtgagcttcagcagtatgcagatgtggctgctgcccgggaatcccgtcagagctccccaagcaccaatgccgccctgcctggccccccggcccaacttatggacagcagtgctgttcccgggacagctctcggaactgagcctcgactagggggtcattgcctcaatagttccctcttggtgactggccagccctgtggtgacaggcacccagtgctggacttaaggggccacaagcgaaagttggccacaccacctgctgcccaggagtcatcccgccggcggtccaggaagggtcatctgccagcccccgtgcagccgtatgaacacgggtatccagtctctggcgggtttgccatgccacccgtctccttaaaccataacctcaccacccccttcacctcccaggctggggagaactccctgtttatgggcagtaccccctcctactaccagctgtccaatttgctggcagatgcccgcctggtgtttccagtgactactgaccctctggtgccagcaggccccgtcagttcctcttccacggctacctcagtcactgccagcaacccctccttcatgctcaacccttctgtgccagggatactacccagctattcactcccattctcacagccactcctgtccgagccgaggatgtttgcgccttttccttcccctgtcttgcccagcaacctttcgcggggcatgtctatctatccaggctacatgtccccacatgcaggctacccagctggtggcctcctacggtcccaggtgcctccatttgactctcatgaggttgccgaggttgggttcagctccaatgatgatgaggataaagacgatgatgtgatagaggtcactgggaaatagctagggagcccctccccacctcacttggggcccccagcaggttgcccaccaagctggaaggcagtgatttagaccttttgagaataggacacttggcaggagggaaaaggaagaggacaaaggagggtggttggccaaagtggcagagctctgttgctgtttaacaaaagaggcaaaaaaaaaaaaaaaaaaaaaaaaaaaa

SEQ ID NO: 2996 - DNA, 2984 bp, Homo sapiens
gttttacgctgccgccggcatccgctcggacgcggccacgttgtcttgcgcgctttgcccgcctggccctgggactctgaccctcggctaccctttcctgccccactagcgtggccgcgagcctcggtgagccggccgtattcccgctctcgcttagggggcacaggcgcaggcatcggcccggccactccaagccttcggtgcgcgggcgcgtctgggatacgggcccgggaggcgccgccctccgtccgcccggtgcctctcaggaacagcgaaccggagagagcgccggagagttgggctcagtgcggagctcggcgccggggcccatgcccgtgcgcccccgcaggccggcgccatggcctccgggagtgtggccgagtgcctgcagcaggagaccacctgccccgtgtgcctgcagtacttcgcagagcccatgatgctcgactgcggccataacatctgttgcgcgtgcctcgcccgctgctggggcacggcagagactaacgtgtcgtgcccgcagtgccgggagaccttcccgcagaggcacatgcggcccaaccggcacctggccaacgtgacccaactggtaaagcagctgcgcaccgagcggccgtcggggcccggcggcgagatgggcgtgtgcgagaagcaccgcgagcccctgaagctgtactgcgaggaggaccagatgcccatctgcgtggtgtgcgaccgctcccgcgagcaccgcggccacagcgtgctgccgctcgaggaggcggtggagggcttcaaggagcaaatccagaaccagctcgaccatttaaaaagagtgaaagatttaaagaagagacgtcgggcccagggggaacaggcacgagctgaactcttgagcctaacccagatggagagggagaagattgtttgggagtttgagcagctgtatcactccttaaaggagcatgagtatcgcctcctggcccgccttgaggagctagacttggccatctacaatagcatcaatggtgccatcacccagttctcttgcaacatctcccacctcagcagcctgatcgctcagctagaagagaagcagcagcagcccaccagggagctcctgcaggacattggggacacattgagcagggctgaaagaatcaggattcctgaaccttggatcacacctccagatttgcaagagaaaatccacatttttgcccaaaaatgtctattcttgacggagagtctaaagcagttcacagaaaaaatgcagtcagatatggagaaaatccaagaattaagagaggctcagttatactcagtggacgtgactctggacccagacacggcctaccccagcctgatcctctctgataatctgcggcaagtgcggtacagttacctccaacaggacctgcctgacaaccccgagaggttcaatctgtttccctgtgtcttgggctctccatgcttcatcgccgggagacattattgggaggtagaggtgggagataaagccaagtggaccataggtgtctgtgaagactcagtgtgcagaaaaggtggagtaacctcagccccccagaatggattctgggcagtgtctttgtggtatgggaaagaatattgggctcttacctccccaatgactgccctacccctgcggaccccgctccagcgggtggggattttcttggactatgatgctggtgaggtctccttctacaacgtgacagagaggtgtcacaccttcactttctctcatgctaccttttgtgggcctgtccggccctacttcagtctgagttactcgggagggaaaagtgcagctcctctgatcatctgccccatgagtgggatagatgggttttctggccatgttgggaatcatggtcattccatggagacctccccttgaggaggtgaattcaggccaaaagggctgttggctgtaatcctacgccaggcacaaggcatcttgttgccttgccacgtcctgtcacagctgggtatccttaccatgttccacgcccttgcagtgggagacaggatgtccatgttctctaccatccttttccttcccatgcagattgtgaaatgtaatgagatgtatcaagacatcctagaaataaaaaccagatgtccacctccagtgtttcatactttctggttttacacatcgctggagggataaagagtatggataatctttggatttggagagccgttcaagatacttccagcttcttggctcagcctggcttcctctggttcagccccacataatgattatggctatttgctgtcatttctgggctagggctcctttctaacaacctagactggaataaggccctgtcagcatggctccctttatcccagttttccgtctgggaacagtacctctgcccctgattcccaatgtgccatagttttattaactccattaaagaagcctgtatgtgttttggttagttacagttattttacaataatggtgggtaatggccccacctctgttatgagataatgttctaatcaatgtctctgcctttgtatcttttctgagggctttgtctgttctcttcattctaatgaaaggtgtattctagtgctgggtgcatatcatccaggataatattctgcccaactccatcctctgttactagatcccttaccagtcacatttgtggactggtggccagtcgtataccatccctggaaggattctgggacaatattccagggattcattgacttcttggctccttttctccatttcctttgggggaagggggaattgaccatgcttaagtgcatcctatcaaggggcagctccgtccccatggccattggatcatgagacactcgaagtcagaaggctggggcagatcacttcaagcaagcccccatgatggttctcagtcctgcttctctgtgggtacgtgcccctctgtttaaaaataaactgaatatggatgtttaaaaaaaaaaaaaaaaaa

SEQ ID NO: 2997 - DNA, 2704 bp, Homo sapiens
gttttacgctgccgccggcatccgctcggacgcggccacgttgtcttgcgcgctttgcccgcctggccctgggactctgaccctcggctaccctttcctgccccactagcgtggccgcgagcctcggtgagccggccgtattcccgctctcgcttagggggcacaggcgcaggcatcggcccggccactccaagccttcggtgcgcgggcgcgtctgggatacgggcccgggaggcgccgccctccgtccgcccggtgcctctcaggaacagcgaaccggagagagcgccggagagttgggctcagtgcggagctcggcgccggggcccatgcccgtgcgcccccgcaggccggcgccatggcctccgggagtgtggccgagtgcctgcagcaggagaccacctgccccgtgtgcctgcagtacttcgcagagcccatgatgctcgactgcggccataacatctgttgcgcgtgcctcgcccgctgctggggcacggcagagactaacgtgtcgtgcccgcagtgccgggagaccttcccgcagaggcacatgcggcccaaccggcacctggccaacgtgacccaactggtaaagcagctgcgcaccgagcggccgtcggggcccggcggcgagatgggcgtgtgcgagaagcaccgcgagcccctgaagctgtactgcgaggaggaccagatgcccatctgcgtggtgtgcgaccgctcccgcgagcaccgcggccacagcgtgctgccgctcgaggaggcggtggagggcttcaaggagcaaatccagaaccagctcgaccatttaaaaagagtgaaagatttaaagaagagacgtcgggcccagggggaacaggcacgagctgaactcttgagcctaacccagatggagagggagaagattgtttgggagtttgagcagctgtatcactccttaaaggagcatgagtatcgcctcctggcccgccttgaggagctagacttggccatctacaatagcatcaatggtgccatcacccagttctcttgcaacatctcccacctcagcagcctgatcgctcagctagaagagaagcagcagcagcccaccagggagctcctgcaggacattggggacacattgagcagggctgaaagaatcaggattcctgaaccttggatcacacctccagatttgcaagagaaaatccacatttttgcccaaaaatgtctattcttgacggagagtctaaagcagttcacagaaaaaatgcagtcagatatggagaaaatccaagaattaagagaggctcagttatactcagtggacgtgactctggacccagacacggcctaccccagcctgatcctctctgataatctgcggcaagtgcggtacagttacctccaacaggacctgcctgacaaccccgagaggtctccttctacaacgtgacagagaggtgtcacaccttcactttctctcatgctaccttttgtgggcctgtccggccctacttcagtctgagttactcgggagggaaaagtgcagctcctctgatcatctgccccatgagtgggatagatgggttttctggccatgttgggaatcatggtcattccatggagacctccccttgaggaggtgaattcaggccaaaagggctgttggctgtaatcctacgccaggcacaaggcatcttgttgccttgccacgtcctgtcacagctgggtatccttaccatgttccacgcccttgcagtgggagacaggatgtccatgttctctaccatccttttccttcccatgcagattgtgaaatgtaatgagatgtatcaagacatcctagaaataaaaaccagatgtccacctccagtgtttcatactttctggttttacacatcgctggagggataaagagtatggataatctttggatttggagagccgttcaagatacttccagcttcttggctcagcctggcttcctctggttcagccccacataatgattatggctatttgctgtcatttctgggctagggctcctttctaacaacctagactggaataaggccctgtcagcatggctccctttatcccagttttccgtctgggaacagtacctctgcccctgattcccaatgtgccatagttttattaactccattaaagaagcctgtatgtgttttggttagttacagttattttacaataatggtgggtaatggccccacctctgttatgagataatgttctaatcaatgtctctgcctttgtatcttttctgagggctttgtctgttctcttcattctaatgaaaggtgtattctagtgctgggtgcatatcatccaggataatattctgcccaactccatcctctgttactagatcccttaccagtcacatttgtggactggtggccagtcgtataccatccctggaaggattctgggacaatattccagggattcattgacttcttggctccttttctccatttcctttgggggaagggggaattgaccatgcttaagtgcatcctatcaaggggcagctccgtccccatggccattggatcatgagacactcgaagtcagaaggctggggcagatcacttcaagcaagcccccatgatggttctcagtcctgcttctctgtgggtacgtgcccctctgtttaaaaataaactgaatatggatgtttaaaaaaaaaaaaaaaaaa

SEQ ID NO: 2998 - DNA, 1527 bp, Homo sapiens
ggccttcaagcgcgggacgcgacaaagtcatggaccgcaacccctcgccgccgccgccgccgggtcgcgacaaggaggaggaggaggaggtggccggtggagactgcatagggagcacggtctacagcaaacactggctcttcggcgtcctcagcggactcatccagattgttagccctgaaaacaccaaatctagctcagatgatgaggagcagctgacggagcttgatgaagaaatggagaatgaaatttgcagagtatgggatatgtcaatggatgaggacgtggctttatttctccaagaatttaatgctcctgatatattcatgggagtactggccaagtccaagtgtcctcgattaagagaaatctgtgtgggaattttaggtaatatggcctgtttccaggagatatgtgtgtccatcagcagtgataaaaatcttgggcaggtgttattgcactgtttgtatgattcagacccacctactctgctggaaacaagcaggttgttgcttacttgcctttcccaggcagaagtggccagtgtttgggttgaaaggatccaggaacatccagctatttatgatagcatttgcttcattatgtcaagttcaacaaatgttgacttgctggtgaaggtgggggaggttgtggacaagctctttgatttggatgagaaactaatgttagaatgggtcagaaatggggctgctcagcctctggaccaaccccaggaagagtctgaagagcagccagtgtttcggcttgtgccctgtatacttgaagctgccaaacaagtacgttctgaaaatccagaatggcttgatgtttacatgcacattttacaactgcttactacagtggatgatggaattcaagcaattgtacattgtcctgacactggaaaagacatttggaatttactttttgacctggtctgccatgaattctgccagtctgatgatccacccatcattcttcaagaacagaaaacggtgctagcctctgttttttcagtgttgtctgccatctatgcctcacagactgagcaagagtatctaaagatagaaaaagtagatcttcctctaattgacagcctcattcgggtcttacaaaatatggaacagtgtcagaaaaaaccagagaactcggcagagtctaacacagaggaaactaaaaggactgatttaacccaagatgatttccacttgaaaatcttaaaggatattttatgtgaatttctttctaatatttttcaggcattaacaaaggagacggtggctcagggagtaaaggaaggccagttgagcaaacagaagtgttcctctgcatttcaaaaccttcttcctttctatagccctgtggtggaagattttattaaaatcctacgtgaagttgataaggcgcttgctgatgacttggaaaaaaacttcccaagtttgaaggttcagacttaaaacctgaattggaattacttctgtacaagaaataaactttatttttctcactgacaaaaaaaaaaaaaaa

SEQ ID NO: 2999 - DNA, 1857 bp, Homo sapiens
agagtcgggtagacggcagcgggagcggtggcgtctccccgccttccctccctcccgggcctgggcgcccagccggacaggtgagcggcagccaggtgagcgcgcccacctgcgcctctccgcgcggcccgccctccccggcgccgggctcctctccgcgcccctgtcggcgcggaaccctggcctcgtccgcggcccagctccctggagcctcgcatcagcgggggcgcccccgcgagctgcgctctccccggccggagcgctcctcctccagcccccagcccgcagggtactttgccctcggagcgaaggaggctccagaactggtagagccgggccatcgggctgggcacctccccgcggcgcccgcagcgcggagtccactgaccggctcaaaggtatggcgttgacggtggatgtggccgggccagcgccctggggcttccgtatcacagggggcagggatttccacacgcccatcatggtgactaaggtggccgagcggggcaaagccaaggacgctgacctccggcctggagacataatcgtggccatcaacggggaaagcgcggagggcatgctgcatgccgaggcccagagcaagatccgccagagcccctcgcccctgcggctgcagctggaccggtctcaggctacgtctccagggcagaccaatggggacagctccttggaagtgctggcgactcgcttccagggctccgtgaggacatacactgagagtcagtcctccttaaggtcctcctactccagcccaacctccctcagcccgagggccggcagccccttctcaccaccaccctctagcagctccctcactggagaggcagccatcagccgcagcttccagagtctggcatgttccccgggcctccccgctgctgaccgcctgtcctactcaggccgccctggaagccgacaggccggcctcggccgcgctggcgactcggcggtgctggtgctgccgccttccccgggccctcgttcctccaggcccagcatggactcggaagggggaagcctcctcctggacgaggactcggaagtcttcaagatgctgcaggaaaatcgcgagggacgggcggccccccgacagtccagctcctttcggctcttgcaggaagccctggaggctgaggagagaggtggcacgccagccttcttgcccagctcactgagcccccagtcctccctgcccgcctccagggccctggccacccctcccaagctccacacttgtgagaagtgcagtaccagcatcgcgaaccaggctgtgcgcatccaggagggccggtaccgccaccccggctgctacacctgtgccgactgtgggctgaacctgaagatgcgcgggcacttctgggtgggtgacgagctgtactgtgagaagcatgcccgccagcgctactccgcacctgccaccctcagctctcgggcctgagcccgccatgccctcagcctgcctcactgctgggccagggtcatgcctatataagttggcatggcagggacaatggtgggcagttgctcttacatgagctaagtttggagacctgaggcccctttgtcctcgctgggtgggccaaggtctgggacctgtcttggactgtgggagactcaccctcaccttgccaggcctctcccctgcaggactggcattgcactagtctgaggtggccactgcctttgatcaacctttgtgtgcgagggtctaagtagggtcgaacacagaagtgggaaggagaggggtgggccaggggctaatggtgtcactgtgtaaagtttttgacatactagctctataaatatatgaatatggacaaaataaaaaaaaaaaaa

SEQ ID NO: 3000 - DNA, 4611 bp, Homo sapiens
aagcccctgagtagctgctccgggagctgtggtgccctctccttctccctttggctcctctcctgctgccttacagtgcccccagagccggctaggggcatggacttcacctcctggtcctctcttcctcaggtatggcgttgacggtggatgtggccgggccagcgccctggggcttccgtatcacagggggcagggatttccacacgcccatcatggtgactaaggtggccgagcggggcaaagccaaggacgctgacctccggcctggagacataatcgtggccatcaacggggaaagcgcggagggcatgctgcatgccgaggcccagagcaagatccgccagagcccctcgcccctgcggctgcagctggaccggtctcaggctacgtctccagggcagaccaatggggacagctccttggaagtgctggcgactcgcttccagggctccgtgaggacatacactgagagtcagtcctccttaaggtcctcctactccagcccaacctccctcagcccgagggccggcagccccttctcaccaccaccctctagcagctccctcactggagaggcagccatcagccgcagcttccagagtctggcatgttccccgggcctccccgctgctgaccgcctgtcctactcaggccgccctggaagccgacaggccggcctcggccgcgctggcgactcggcggtgctggtgctgccgccttccccgggccctcgttcctccaggcccagcatggactcggaagggggaagcctcctcctggacgaggactcggaagtcttcaagatgctgcaggaaaatcgcgagggacgggcggccccccgacagtccagctcctttcggctcttgcaggaagccctggaggctgaggagagaggtggcacgccagccttcttgcccagctcactgagcccccagtcctccctgcccgcctccagggccctggccacccctcccaagctccacacttgtgagaagtgcagtaccagcatcgcgaaccaggctgtgcgcatccaggagggccggtaccgccaccccggctgctacacctgtgccgactgtgggctgaacctgaagatgcgcgggcacttctgggaggacgcttgtgctatggagggaatgagattgtcactggaagctttggaggggatggtggagggcgccaagcggagggacaggaggaagaccaggagacccatccagccaagctggtgagacaacctctgatcctgaggaccggccgcccaccaagggttgggcccccggggccaggttgatctaccgacaccttccacttctttcctgggagagactgctggcttcattggtgattgatttggaggggggaaaaagggcagggtggctcaggctttaggcccaggtactggggaggcctgaggagccctcctggagctcaggaggccgaggctgccttgagctgtgatcgtgccactgcattccagcctgggagagagagaggacctgtctgttgaaaaaaacacaaaaacaaatgaatgcatgtggccagtgccaggtgagctgccctgggggttcactggagttgaggcaggggacagtagtctcccctgccagcctaggattttgggcgtcattcacccactacccctagtgctagtcccagaggatgctgcggagggggcagcctcagctctcttttcagagaagatcaaagctgggcttcccagggtgcctggctggtccctgccggcagctttgtgctctccggctctttgtgaaaggaatcttggcgcagatgtttgtgttgcctcctcaggcacctgtagatataatttacaccatgatatcattgtctcaccttttgcctgggtggctgcctgagaaaggtctttctttttatagaaaagatcaaggctgtctggcgcgggactccatgagccccaggcgctggtcagaaacggggtagtctctttggcgccacctagtgtccagtttggcccatggcggggcccattcacggggcaacactgggcttctgggcacagcgggaatacagaaagatacagcactcctcatgccttcctggaggtagaaggccagtggcagcgactgagctggcatgaatgaataagaggatgtggcactgagcgccaagggctaccttggaacgcaccgaggagcgtcccgtgagttcaaagcagtggccgtgatgcaaaaggagggctgggtcttggagacgtggagaagaggaatgctgagtgatggggtggctgctggggggatgcttagctcagagcagtggctgatggggacactgagataagatcggaggggagctgtcaatgccagaagtggtttgaacttccccttgaggctctagggacattttgttttgagacatggtcttgctctattgcccaggctggagtgcagtggtacagtcttagctcactgcagcctccacctcccaggctcaagagatcctcccacagcctcccaggtagctgggactacaggcgtgcaccaccacacccagctaatttttaagtttttttttttttttaagagatggggtctcactatgttgcccaggctggtctcgaacttcgggccccaagccatcctcccaccttggctttccaaagtgttgggattacaagcgtgagctaaccttgcccagcctctgggaacacttggaaggttttaagcagagaagtgacaggttggaaaagatggtttggattattgatatggacagattcccacctgtatgtagcacgccatgctgggccagcagtgtcataggagtggagggggataagtggggactggggacatgtgaaatgatgggcattccagtgaggcatcgaatgccttctgagggctttgtaggttccagctcaaatccccctctggctcttgttctttggtgtggcagccatctctcctcccaggggtcctgagggtttcagcaccagggttctctgcagccacacaatcagcccggctcgggagcaaactcccctggaagaacggagttatgagttggtcagcagaggaggctggggacaggcagtttttggtcttttacctctgatcttgtccccaacctaagccagctagctgcgtgctcccactccctctgccgcacgccgcccgtctatgttcccggactttgtccagtgcagtgccctcttcccttcctgcactgaggagattaactgaagtgacagattagagttagaagtggcccaaaggagcatctggtacaaccccctttggttagagaagggaaagtgacttttccaaagctgcacagctagacagtcataatggctaagctctgggggtgcttttgatgtgctagggatacttccaatgctttaactcacttaatcctcacaacccgagataggtactgttaccatcctctctgcagacgaggaaaccgaggaccaggaggttcagtaaatggtccaagtactcctagctagtaaggaatggatctacagcctgcctcccaggtttctggcttgtggggggcagagtttgtccctctgtcatcagaggcagccttccaggcacagctctggtcacctctggtcacaactggaggtcaccacagccctccccagcgctctgtaggctctcagctttgtgcttcctcccacgggtactagctccagctgagcttgcaggaaacccacttcctgaagccaggacttccccatgggaagtgcaggggccactgggcagcctgagggctgaccctgctcaggacactgtctgtctcaggaactcatggcagtggtttaccttgtcaggagtgcatggacgggctgcccctcccattccttcaagcatcactcagagagccctggcctggctctaggcttgggactgcggctgccacaggaagggggcatccccctactttgggtgttgggtcagatcctgcccccgtgcccgccagggctcaggttcctctgagctggtcctgggccaggacgcatctgcatggcggtggtggggaggaggggtgcgccatggcctggaggggagtgtgtgttggggtgtgtgtgtggaggttcttttgagtcacacacaaagcattgtgctgagacactgcattcctgctggctgggcttcctgtttccagatgcattcctgtcccagagtcaccacagagactgtttggaatcccgccccacattctccaaattcagggcgcgatctggcaaaggctccctcccccaccctcttactttggagggagtctgggctccctcctacccagggagggctggcagggctctggcacggccggggtgtgattccacacatcttcttggtcttgcataaggcagttcctggagacccagcactctggttctctctctgcctgtgagaagcggaatgggtactgtctaggaggactgggcagggtgggggcaacccagaggacccatggctagcagggaagggcctgggcttgaatgtgactctgttgagacatggccagcaattctggcacttggctgtcattcggctggcctgcgcagagattggctgtgggcctcagtttccccattttataaagttttaaaatctg

SEQ ID NO: 3001 - DNA, 1473 bp, Homo sapiens
aagcccctgagtagctgctccgggagctgtggtgccctctccttctccctttggctcctctcctgctgccttacagtgcccccagagccggctaggggcatggacttcacctcctggtcctctcttcctcaggtatggcgttgacggtggatgtggccgggccagcgccctggggcttccgtatcacagggggcagggatttccacacgcccatcatggtgactaaggtggccgagcggggcaaagccaaggacgctgacctccggcctggagacataatcgtggccatcaacggggaaagcgcggagggcatgctgcatgccgaggcccagagcaagatccgccagagcccctcgcccctgcggctgcagctggaccggtctcaggctacgtctccagggcagaccaatggggacagctccttggaagtgctggcgactcgcttccagggctccgtgaggacatacactgagagtcagtcctccttaaggtcctcctactccagcccaacctccctcagcccgagggccggcagccccttctcaccaccaccctctagcagctccctcactggagaggcagccatcagccgcagcttccagagtctggcatgttccccgggcctccccgctgctgaccgcctgtcctactcaggccgccctggaagccgacaggccggcctcggccgcgctggcgactcggcggtgctggtgctgccgccttccccgggccctcgttcctccaggcccagcatggactcggaagggggaagcctcctcctggacgaggactcggaagtcttcaagatgctgcaggaaaatcgcgagggacgggcggccccccgacagtccagctcctttcggctcttgcaggaagccctggaggctgaggagagaggaaccaggctgtgcgcatccaggagggccggtaccgccaccccggctgctacacctgtgccgactgtgggctgaacctgaagatgcgcgggcacttctgggtgggtgacgagctgtactgtgagaagcatgcccgccagcgctactccgcacctgccaccctcagctctcgggcctgagcccgccatgccctcagcctgcctcactgctgggccagggtcatgcctatataagttggcatggcagggacaatggtgggcagttgctcttacatgagctaagtttggagacctgaggcccctttgtcctcgctgggtgggccaaggtctgggacctgtcttggactgtgggagactcaccctcaccttgccaggcctctcccctgcaggactggcattgcactagtctgaggtggccactgcctttgatcaacctttgtgtgcgagggtctaagtagggtcgaacacagaagtgggaaggagaggggtgggccaggggctaatggtgtcactgtgtaaagtttttgacatactagctctataaatatatgaatatggacaaaataaaaaaaaaaaaa

SEQ ID NO: 3002 - DNA, 1590 bp, Homo sapiens
atgagagacggcttctcatcatggcggaccctagagataaggcgcttcaggactaccgcaagaagttgcttgaacacaaggagatcgacggccgtcttaaggagttaagggaacaattaaaagaacttaccaagcagtatgaaaagtctgaaaatgatctgaaggccctacagagtgttgggcagatcgtgggtgaagtgcttaaacagttaactgaagaaaaattcattgttaaagctaccaatggaccaagatatgttgtgggttgtcgtcgacagcttgacaaaagtaagctgaagccaggaacaagagttgctttggatatgactacactaactatcatgagatatttgccgagagaggtggatccactggtttataacatgtctcatgaggaccctgggaatgtttcttattctgagattggagggctatcagaacagatccgggaattaagagaggtgatagaattacctcttacaaacccagagttatttcagcgtgtaggaataatacctccaaaaggctgtttgttatatggaccaccaggtacgggaaaaacactcttggcacgagccgttgctagccagctggactgcaatttcttaaaggttgtatctagttctattgtagacaagtacattggtgaaagtgctcgtttgatcagagaaatgtttaattatgctagagatcatcaaccatgcatcatttttatggatgaaatagatgctattggtggtcgtcggttttctgagggtacttcagctgacagagagattcagagaacgttaatggagttactgaatcaaatggatggatttgatactctgcatagagttaaaatgatcatggctacaaacagaccagatacactggatcctgctttgctgcgtccaggaagattagatagaaaaatacatattgatttgccaaatgaacaagcaagattagacatactgaaaatccatgcaggtcccattacaaagcatggtgaaatagattatgaagcaattgtgaagctttcggatggctttaatggagcagatctgagaaatgtttgtactgaagcaggtatgttcgcaattcgtgctgatcatgattttgtagtacaggaagacttcatgaaagcagtcagaaaagtggctgattctaagaagctggagtctaaattggactacaaacctgtgtaatttactgtaagatttttgatggctgcatgacagatgttggcttattgtaaaaataaagttaaagaaaataatgtatgtattggcaatgatgtcattaaaagtatatgaataaaaatatgagtaacatcataaaaattagtaattcaacttttaagatacagaagaaatttgtatgtttgttaaagttgcatttattgcagcaagttacaaagggaaagtgttgaagcttttcatatttgctgcgtgagcattttgtaaaatattgaaagtggtttgagatagtggtataagaaagcatttcttatgacttattttgtatcatttgttttcctcatctaaaaagttgaataaaatctgtttgattcagttctcctacatataaaaaaaaaaaaaaaaaaaa

SEQ ID NO: 3003 - DNA, 1584 bp, Homo sapiens
cgaggaggggagcgggaagcgcagtgccagcgccacagcccttcaatcattttggttgctatccagcttctccacatcaagtccaacttcagaaaccccaagcctgtagagaaaagttgacctgtgctgactctggtgatggtgactgtctctcactaatttctttgaagtcttcaaggataagcagagttgatccatctgagaaagggatcatgaactagacagaatgaacagccttagaggcacagactcttgaacgggacggtggtggtatgactagtgcagagtgtttagagatcactcagtttttaaagactggcctttatcgtgtctcagtgcagccgaggcagagcctttgaaggatgcgatgttgtcattcttactaatctagtccagccgctgaggtgactttcaacggcagaccgtctcctgagcgccccaggtagaatttcaaaagtctccgggaccattatggcagtcaagtggacgggtgggcattcttctcctgtcctctgcctgaatgcaagtaaagaagggctgctggcttctggagcagagggcggagatctcacggcttggggtgaagatggaactccattaggacacacgcggttccaaggggctgatgatgttaccagtgtcttattttctccctcctgtcccaccaagctctatgcctcacatggagaaaccattagtgtactggatgtcaggtccctcaaagattccttggaccattttcatgtgaatgaagaagaaatcaattgtctttcattgaatcaaacggaaaacctgctggcttctgctgacgactctggggcaatcaaaatcctagacttggaaaacaagaaagttatcagatccttgaagagacattccaatatctgctcctcagtggcttttcggcctcagaggcctcagagcctggtgtcatgtggactggatatgcaggtgatgctgtggagtcttcaaaaagcccgaccactctggattacaaatttacaggaggatgaaacagaagaaatggaaggcccacagtcacctggtcagctcttaaaccctgccctagcccattctatctctgtggcttcgtgtggtaatatttttagttgtggtgcagaagatggtaaggttcgaatctttcgggtgatgggagttaagtgtgaacaggaactgggatttaagggccacacttcaggggtatcccaggtctgctttctcccagaatcctatttgctgcttactggagggaatgatgggaagatcacgttgtgggatgcaaacagtgaagttgagaaaaaacagaagagtcccacaaaacgtacccacaggaagaaacctaaaagaggaacttgcaccaagcagggtggaaatactaacgcttcagtaacagatgaggaagaacatggcaacattttaccaaagctaaatattgaacatggagaaaaagtgaactggctcttgggtacaaaaataaagggacaccaaaatatattagtagctgatcaaactagttgtatatctgtataccccttaaatgaattttaaatccaataaaaacatttgaagaaaaaaaaaaaaaaa

SEQ ID NO: 3004 - DNA, 2474 bp, Homo sapiens
agcgactcacaaaaggtcctcggccacggcgtgcgtcaccatggcgaccgccgccggcagccgcgccccgcccctctggcgggaccggccaccatcctctcgcgaggagcatcccgtgcgaccggaagtggggcggcgaccccggaagtccccgccgggtgcagcttggtcggttcgatcgccgccgggacctgacaccgcccggagttggcgtcccttctccctctccgagtgctgctcctgtcattgtggccatggacgataccctgttccagttgaagttcacggcgaagcagctggagaagctggccaagaaggcggagaaggactccaaggcggagcaggccaaagtgaagaaggcccttctgcagaaaaatgtagagtgtgcccgtgtgtatgccgagaacgccatccgcaagaagaacgaaggtgtgaactggcttcggatggcgtcccgcgtagacgcagtggcctccaaggtggacacagctgtgactatgaagggggtgaccaagaatatggcccaggtgaccaaagccctggacaaggccctgagcaccatggacctgcagaaggtctcctcagtgatggacaggttcgagcagcaggtgcagaacctggacgtccatacatcggtgatggaggactccatgagctcggccaccaccctgaccacgccgcaggagcaggtggacagcctcatcatgcagatcgccgaggagaatggcctggaggtgctggaccagctcagccagctgcccgagggcgcctctgccgtgggcgagagctctgtgcgcagccaggaggaccagctgtcacggaggttggccgccttgaggaactagccgtgccccgccggtgtgcaccgcctctgccccgtgatgtgctggaaggctcctgtcctctccccaccgcgtcttgcctttgtgctgaccccgcggggctgcggccggcagccactctgcgtctctcacctgccaggcctgcgtggccttagggttgttcctgttcttttaggttgggcggtgggtctgtgtcctggtgttgagtttctgcaaatttctgggggtgatttctgtgactctgggcccacagcggggaggccaagaggggccctgtggactttcacccagcactgtgggggccttcagactctggggcagcagacatgctgcttcccatcagccagagggggtcagggctgccctgttgccaaacaactccctgaggcctctccgcaccacctcagcgggcaggaggtcccaccatgtggacagacatagcccaaggaggcaccacaggtctatgtgtgctgggggatgtcaggtgccacccaacgctgtcctggtggtatttacaatgacatcctcctcctccatcactccaggggtggtgtctcggccgcccctaccagctggctgagccccctggcctcctgcgctccctcacttccctcagttcccaaagctgcccagtccatggggacagaaccgtcactcagatccacattcaagtgtgcccaccctgcagtcttcatcctcactcagctgctgcctctggaggtgcctttggccacatgtgctgtgctgtttgtctcctcgacagggagcctgtccaccagcaggctgcggtcccagcgggtgcgtctgcagctcctccccttgggcaggctggttctcccggaggacctttccttggggccctgcttcatgacgatgctgcctgtgtcaccctctaccatctgtaaacaactgggtgccttccccgaccacaccccaatgccttcccagcttggaagccaaggcagctgatgaagggagctcaggagagccgtcttcagctgggctggggttggggctgctgtgaggaaaacctgccattgtggccctggagagtcaccagcagctcttgggaaggacttgctgggaggctgagagaggctttgggcacagcctgctgtcttttccatttcctaaagtttacttcattgtcttgaggcttccaggttttgtttttgtttttgccaaagtagaaaaggcaggtggtgggcggctggcagggagtgcgggtccccgcccctcttcagtcctgccctcccctcctcagtcctgcccaccccgtgcagcccatgctgaggctgcagtggtgtcgtgggtgttacgtgcaggaacgtggagaccctgacgtgggctcactgcatttggttttcttttcagaacttgggagcccccagggaggggctagtgttggtaggtcctagacgtggttccctccagcctccccaaaatcaaccctggtgttgagagaacgtccttctgtccatcgtgggtaacagccttggggagggtgcagagctctgcagagccatgggccaggtggggctgcctcagtcctgtccccttgggcactgaggagaggggcccattcacctttctcctagaatgctgttgtaaataaacaaatggatccctgga

SEQ ID NO: 3005 - DNA, 787 bp, Homo sapiens
ggactgtggaggggcgcacgcccggaagcggcgagggtagccatgacggcctccgtgctgcgaagtatctcgctagccctgcgcccgactagcgggcttctgggaacttggcagacgcagcttagagagactcaccagcgagcgtcattgttgtctttctgggaactcattcccatgagatcagaacctcttcgaaaaaagaagaaggtagatcctaaaaaagaccaagaagcaaaggagcgcttgaaaaggaagatccgaaaactggaaaaggctactcaagagctaattcctattgaagattttattacccctctaaagttcttggataaagcaagagagcggcctcaggtggagctcacctttgaggagactgagaggagagctctgcttctgaagaagtggtccttgtacaagcagcaagagcgtaagatggagagggacaccatcagggctatgctagaagcccagcaggaagctctggaggaactgcaactggaatccccgaagctccatgctgaggccatcaagcgggatcctaacctgttcccctttgagaaggaagggccacattacacaccaccgatccctaactaccaaccccctgaaggcaggtacaatgacatcaccaaggtgtacacacaagtggagtttaagagatagacttgcaggctgctatccttaacatgctgcccctgagagtaggaatgaccagggttcaagtctgctttccacagaatcaggcatgctgttaataaatactggtttaatcaaaaaaaaaaaaaaa

SEQ ID NO: 3006 - protein, 397 aa, Homo sapiens
MRLLRGVFVVAAKRTPFGAYGGLLKDFTATDLSEFAAKAALSAGKVSPETVDSVIMGNVLQSSSDAIYLARHVGLRVGIPKETPALTINRLCGSGFQSIVNGCQEICVKEAEVVLCGGTESMSQAPYCVRNVRFGTKLGSDIKLEDSLWVSLTDQHVQLPMAMTAENLTVKHKISREECDKYALQSQQRWKAANDAGYFNDEMAPIEVKTKKGKQTMQVDEHARPQTTLEQLQKLPPVFKKDGTVTAGNASGVADGAGAVIIASEDAVKKHNFTPLARIVGYFVSGCDPSIMGIGPVPAISGALKKAGLSLKDMDLVEVNEAFAPQYLAVERSLDLDISKTNVNGGAIALGHPLGGSGSRITAHLVHELRRRGGKYAVGSACIGGGQGIAVIIQSTA

SEQ ID NO: 3007 - protein, 301 aa, Homo sapiens
MADQPKPISPLKNLLAGGFGGVCLVFVGHPLDTVKVRLQTQPPSLPGQPPMYSGTFDCFRKTLFREGITGLYRGMAAPIIGVTPMFAVCFFGFGLGKKLQQKHPEDVLSYPQLFAAGMLSGVFTTGIMTPGERIKCLLQIQASSGESKYTGTLDCAKKLYQEFGIRGIYKGTVLTLMRDVPASGMYFMTYEWLKNIFTPEGKRVSELSAPRILVAGGIAGIFNWAVAIPPDVLKSRFQTAPPGKYPNGFRDVLRELIRDEGVTSLYKGFNAVMIRAFPANAACFLGFEVAMKFLNWATPNL

SEQ ID NO: 3008 - protein, 1177 aa, Homo sapiens
MDEPPFSEAALEQALGEPCDLDAALLTDIEGEVGAGRGRANGLDAPRAGADRGAMDCTFEDMLQLINNQDSDFPGLFDPPYAGSGAGGTDPASPDTSSPGSLSPPPATLSSSLEAFLSGPQAAPSPLSPPQPAPTPLKMYPSMPAFSPGPGIKEESVPLSILQTPTPQPLPGALLPQSFPAPAPPQFSSTPVLGYPSPPGGFSTGSPPGNTQQPLPGLPLASPPGVPPVSLHTQVQSVVPQQLLTVTAAPTAAPVTTTVTSQIQQVPVLLQPHFIKADSLLLTAMKTDGATVKAAGLSPLVSGTTVQTGPLPTLVSGGTILATVPLVVDAEKLPINRLAAGSKAPASAQSRGEKRTAHNAIEKRYRSSINDKIIELKDLVVGTEAKLNKSAVLRKAIDYIRFLQHSNQKLKQENLSLRTAVHKSKSLKDLVSACGSGGNTDVLMEGVKTEVEDTLTPPPSDAGSPFQSSPLSLGSRGSGSGGSGSDSEPDSPVFEDSKAKPEQRPSLHSRGMLDRSRLALCTLVFLCLSCNPLASLLGARGLPSPSDTTSVYHSPGRNVLGTESRDGPGWAQWLLPPVVWLLNGLLVLVSLVLLFVYGEPVTRPHSGPAVYFWRHRKQADLDLARGDFAQAAQQLWLALRALGRPLPTSHLDLACSLLWNLIRHLLQRLWVGRWLAGRAGGLQQDCALRVDASASARDAALVYHKLHQLHTMGKHTGGHLTATNLALSALNLAECAGDAVSVATLAEIYVAAALRVKTSLPRALHFLTRFFLSSARQACLAQSGSVPPAMQWLCHPVGHRFFVDGDWSVLSTPWESLYSLAGNPVDPLAQVTQLFREHLLERALNCVTQPNPSPGSADGDKEFSDALGYLQLLNSCSDAAGAPAYSFSISSSMATTTGVDPVAKWWASLTAVVIHWLRRDEEAAERLCPLVEHLPRVLQESERPLPRAALHSFKAARALLGCAKAESGPASLTICEKASGYLQDSLATTPASSSIDKAVQLFLCDLLLVVRTSLWRQQQPPAPAPAAQGTSSRPQASALELRGFQRDLSSLRRLAQSFRPAMRRVFLHEATARLMAGASPTRTHQLLDRSLRRRAGPGGKGGAVAELEPRPTRREHAEALLLASCYLPPGFLSAPGQRVGMLAEAARTLEKLGDRRLLHDCQQMLMRLGGGTTVTSS

SEQ ID NO: 3009 - protein, 1147 aa, Homo sapiens
MDEPPFSEAALEQALGEPCDLDAALLTDIEDMLQLINNQDSDFPGLFDPPYAGSGAGGTDPASPDTSSPGSLSPPPATLSSSLEAFLSGPQAAPSPLSPPQPAPTPLKMYPSMPAFSPGPGIKEESVPLSILQTPTPQPLPGALLPQSFPAPAPPQFSSTPVLGYPSPPGGFSTGSPPGNTQQPLPGLPLASPPGVPPVSLHTQVQSVVPQQLLTVTAAPTAAPVTTTVTSQIQQVPVLLQPHFIKADSLLLTAMKTDGATVKAAGLSPLVSGTTVQTGPLPTLVSGGTILATVPLVVDAEKLPINRLAAGSKAPASAQSRGEKRTAHNAIEKRYRSSINDKIIELKDLVVGTEAKLNKSAVLRKAIDYIRFLQHSNQKLKQENLSLRTAVHKSKSLKDLVSACGSGGNTDVLMEGVKTEVEDTLTPPPSDAGSPFQSSPLSLGSRGSGSGGSGSDSEPDSPVFEDSKAKPEQRPSLHSRGMLDRSRLALCTLVFLCLSCNPLASLLGARGLPSPSDTTSVYHSPGRNVLGTESRDGPGWAQWLLPPVVWLLNGLLVLVSLVLLFVYGEPVTRPHSGPAVYFWRHRKQADLDLARGDFAQAAQQLWLALRALGRPLPTSHLDLACSLLWNLIRHLLQRLWVGRWLAGRAGGLQQDCALRVDASASARDAALVYHKLHQLHTMGKHTGGHLTATNLALSALNLAECAGDAVSVATLAEIYVAAALRVKTSLPRALHFLTRFFLSSARQACLAQSGSVPPAMQWLCHPVGHRFFVDGDWSVLSTPWESLYSLAGNPVDPLAQVTQLFREHLLERALNCVTQPNPSPGSADGDKEFSDALGYLQLLNSCSDAAGAPAYSFSISSSMATTTGVDPVAKWWASLTAVVIHWLRRDEEAAERLCPLVEHLPRVLQESERPLPRAALHSFKAARALLGCAKAESGPASLTICEKASGYLQDSLATTPASSSIDKAVQLFLCDLLLVVRTSLWRQQQPPAPAPAAQGTSSRPQASALELRGFQRDLSSLRRLAQSFRPAMRRVFLHEATARLMAGASPTRTHQLLDRSLRRRAGPGGKGGAVAELEPRPTRREHAEALLLASCYLPPGFLSAPGQRVGMLAEAARTLEKLGDRRLLHDCQQMLMRLGGGTTVTSS

SEQ ID NO: 3010 - protein, 807 aa, Homo sapiens
MMDSPFLELWQSKAVSIREQLGLGDRPNDSYCYNSAKNSTVLQGVTFGGIPTVLLIDVSCFLFLILVFSIIRRRFWDYGRIALVSEADSESRFQRLSSTSSSGQQDFENELGCCPWLTAIFRLHDDQILEWCGEDAIHYLSFQRHIIFLLVVVSFLSLCVILPVNLSGDLLDKDPYSFGRTTIANLQTDNDLLWLHTIFAVIYLFFTVGFMRHHTQSIKYKEENLVRRTLFITGLPRDARKETVESHFRDAYPTCEVVDVQLCYNVAKLIYLCKEKKKTEKSLTYYTNLQVKTGQRTLINPKPCGQFCCCEVLGCEWEDAISYYTRMKDRLLERITEEERHVQDQPLGMAFVTFQEKSMATYILKDFNACKCQSLQCKGEPQPSSHSRELYTSKWTVTFAADPEDICWKNLSIQGLRWWLQWLGINFTLFLGLFFLTTPSIILSTMDKFNVTKPIHALNNPIISQFFPTLLLWSFSALLPSIVYYSTLLESHWTKSGENQIMMTKVYIFLIFMVLILPSLGLTSLDFFFRWLFDKTSSEASIRLECVFLPDQGAFFVNYVIASAFIGNGMELLRLPGLILYTFRMIMAKTAADRRNVKQNQAFQYEFGAMYAWMLCVFTVIVAYSITCPIIAPFGLIYILLKHMVDRHNLYFVYLPAKLEKGIHFAAVNQALAAPILCLFWLYFFSFLRLGMKAPATLFTFLVLLLTILVCLAHTCFGCFKHLSPLNYKTEEPASDKGSEAEAHMPPPFTPYVPRILNGLASERTALSPQQQQQQTYGAIHNISGTIPGQCLAQSATGSVAAAPQEA

SEQ ID NO: 3011 - protein, 197 aa, Homo sapiens
MRVAGGRALSRGAELRVPGGAKHGMCLLLGATGVGKTLLVKRLQEVSSRDGKGDLGEPPPTRPTVGTNLTDIVAQRKITIRELGGCMGPIWSSYYGNCRSLLFVMDASDPTQLSASCVQLLGLLSAEQLAEASVLILFNKIDLPCYMSTEEMKSLIRLPDIIACAKQNITTAEISAREGTGLAGVLAWLQATHRAND

SEQ ID NO: 3012 - protein, 197 aa, Homo sapiens; identical to SEQ ID NO: 3011

SEQ ID NO: 3013 - protein, 253 aa, Homo sapiens
MLQMLQPGPKLNPGVAVEFAWCLHYIICSQVSNPLLIGHGALSTLGLLLLDLAGAVQKSEDAGLELLACPVLRCLSNLLTEAAVETVGGQMQLRDERVVAALFILLQFFFQKQPSLLPEGLWLLNNLTANSPSFCTSLLSLDLIEPLLQLLPVSNVVSVMVLTVLCNVAEKGPAYCQRLWPGPLLPALLHTLAFSDTEVVGQSLELLHLLFLYQPEAVQVFLQQSGLQALERHQEEAQLQDRVYALQQTALQG

SEQ ID NO: 3014 - protein, 671 aa, Homo sapiens
MGTQRLCGRGTQGWPGSSEQHVQEATSSAGLHSGVDELGVRSEPGGRLPERSLGPAHPAPAAMAGTLDLDKGCTVEELLRGCIEAFDDSGKVRDPQLVRMFLMMHPWYIPSSQLAAKLLHIYQQSRKDNSNSLQVKTCHLVRYWISAFPAEFDLNPELAEQIKELKALLDQEGNRRHSSLIDIDSVPTYKWKRQVTQRNPVGQKKRKMSLLFDHLEPMELAEHLTYLEYRSFCKILFQDYHSFVTHGCTVDNPVLERFISLFNSVSQWVQLMILSKPTAPQRALVITHFVHVAEKLLQLQNFNTLMAVVGGLSHSSISRLKETHSHVSPETIKLWEGLTELVTATGNYGNYRRRLAACVGFRFPILGVHLKDLVALQLALPDWLDPARTRLNGAKMKQLFSILEELAMVTSLRPPVQANPDLLSLLTVSLDQYQTEDELYQLSLQREPRSKSSPTSPTSCTPPPRPPVLEEWTSAAKPKLDQALVVEHIEKMVESVFRNFDVDGDGHISQEEFQIIRGNFPYLSAFGDLDQNQDGCISREEMVSYFLRSSSVLGGRMGFVHNFQESNSLRPVACRHCKALILGIYKQGLKCRACGVNCHKQCKDRLSVECRRRAQSVSLEGSAPSPSPMHSHHHRAFSFSLPRPGRRGSRPPEIREEEVQTVEDGVFDIHL

SEQ ID NO: 3015 - protein, 609 aa, Homo sapiens
MAGTLDLDKGCTVEELLRGCIEAFDDSGKVRDPQLVRMFLMMHPWYIPSSQLAAKLLHIYQQSRKDNSNSLQVKTCHLVRYWISAFPAEFDLNPELAEQIKELKALLDQEGNRRHSSLIDIDSVPTYKWKRQVTQRNPVGQKKRKMSLLFDHLEPMELAEHLTYLEYRSFCKILFQDYHSFVTHGCTVDNPVLERFISLFNSVSQWVQLMILSKPTAPQRALVITHFVHVAEKLLQLQNFNTLMAVVGGLSHSSISRLKETHSHVSPETIKLWEGLTELVTATGNYGNYRRRLAACVGFRFPILGVHLKDLVALQLALPDWLDPARTRLNGAKMKQLFSILEELAMVTSLRPPVQANPDLLSLLTVSLDQYQTEDELYQLSLQREPRSKSSPTSPTSCTPPPRPPVLEEWTSAAKPKLDQALVVEHIEKMVESVFRNFDVDGDGHISQEEFQIIRGNFPYLSAFGDLDQNQDGCISREEMVSYFLRSSSVLGGRMGFVHNFQESNSLRPVACRHCKALILGIYKQGLKCRACGVNCHKQCKDRLSVECRRRAQSVSLEGSAPSPSPMHSHHHRAFSFSLPRPGRRGSRPPEIREEEVQTVEDGVFDIHL

SEQ ID NO: 3016 - protein, 620 aa, Homo sapiens
MSEHVEPAAPGPGPNGGGGGPAPARGPRTPNLNPNPLINVRDRLFHALFFKMAVTYSRLFPPAFRRLFEFFVLLKALFVLFVLAYIHIVFSRSPINCLEHVRDKWPREGILRVEVRHNSSRAPVFLQFCDSGGRGSFPGLAVEPGSNLDMEDEEEEELTMEMFGNSSIKFELDIEPKVFKPPSSTEALNDSQEFPFPETPTKVWPQDEYIVEYSLEYGFLRLSQATRQRLSIPVMVVTLDPTRDQCFGDRFSRLLLDEFLGYDDILMSSVKGLAENEENKGFLRNVVSGEHYRFVSMWMARTSYLAAFAIMVIFTLSVSMLLRYSHHQIFVFIVDLLQMLEMNMAIAFPAAPLLTVILALVGMEAIMSEFFNDTTTAFYIILIVWLADQYDAICCHTSTSKRHWLRFFYLYHFAFYAYHYRFNGQYSSLALVTSWLFIQHSMIYFFHHYELPAILQQVRIQEMLLQAPPLGPGTPTALPDDMNNNSGAPATAPDSAGQPPALGPVSPGASGSPGPVAAAPSSLVAAAASVAAAAGGDLGWMAETAAIITDASFLSGLSASLLERRPASPLGPAGGLPHAPQDSVPPSDSAASDTTPLGAAVGGPSPASMAPTEAPSEVGS

SEQ ID NO: 3017 - protein, 408 aa, Homo sapiens
MSEHVEPAAPGPGPNGGGGGPAPARGPRTPNLNPNPLINVRDRLFHALFFKMAVTYSRLFPPAFRRLFEFFVLLKALFVLFVLAYIHIVFSRSPINCLEHVRDKWPREGILRVEVRHNSSRAPVFLQFCDSGGRGSFPGLAVEPGSNLDMEDEEEEELTMEMFGNSSIKFELDIEPKVFKPPSSTEALNDSQEFPFPETPTKVWPQDEYIVEYSLEYGFLRLSQATRQRLSIPVMVVTLDPTRDQCFGDRFSRLLLDEFLGYDDILMSSVKGLAENEENKGFLRNVVSGEHYRFVSMWMARTSYLAAFAIMVIFTLSVSMLLRYSHHQIFVFIVDLLQMLEMNMAIAFPAAPLLTVILALVGMEAIMSEFFNDTTTAFYIILIVWLADQYDAICCHTSTSKRHWLRIP

SEQ ID NO: 3018 - protein, 325 aa, Homo sapiens
MATRRLTDAFLLLRNNSIQNRQLLAEQVSSHITSSPLHSRSIAAELDELADDRMALVSGISLDPEAAIGVTKRPPPKWVDGVDEIQYDVGRIKQKMKELASLHDKHLNRPTLDDSSEEEHAIEITTQEITQLFHRCQRAVQALPSRARACSEQEGRLLGNVVASLAQALQELSTSFRHAQSGYLKRMKNREERSQHFFDTSVPLMDDGDDNTLYHRGFTEDQLVLVEQNTLMVEEREREIRQIVQSISDLNEIFRDLGAMIVEQGTVLDRIDYNVEQSCIKTEDGLKQLHKAEQYQKKNRKMLVILILFVIIIVLIVVLVGVKSR

SEQ ID NO: 3019 - protein, 115 aa, Homo sapiens
MATRRLTDAFLLLRNNSIQNRQLLAEQELDELADDRMALVSGISLDPEAAIGVTKRPPPKWVDGVDEIQYDVGRIKQKMKELASLHDKHLNRPTLDDSSEEEHAIEITTQEITQA

SEQ ID NO: 3020 - protein, 304 aa, Homo sapiens
MATRRLTDAFLLLRNNSIQNRQLLAEQLADDRMALVSGISLDPEAAIGVTKRPPPKWVDGVDEIQYDVGRIKQKMKELASLHDKHLNRPTLDDSSEEEHAIEITTQEITQLFHRCQRAVQALPSRARACSEQEGRLLGNVVASLAQALQELSTSFRHAQSGYLKRMKNREERSQHFFDTSVPLMDDGDDNTLYHRGFTEDQLVLVEQNTLMVEEREREIRQIVQSISDLNEIFRDLGAMIVEQGTVLDRIDYNVEQSCIKTEDGLKQLHKAEQYQKKNRKMLVILILFVIIIVLIVVLVGVKSR

SEQ ID NO: 3021 - protein, 1093 aa, Homo sapiens
MKEMVGGCCVCSDERGWAENPLVYCDGHACSVAVHQACYGIVQVPTGPWFCRKCESQERAARVRCELCPHKDGALKRTDNGGWAHVVCALYIPEVQFANVLTMEPIVLQYVPHDRFNKTCYICEEQGRESKAASGACMTCNRHGCRQAFHVTCAQMAGLLCEEEVLEVDNVKYCGYCKYHFSKMKTSRHSSGGGGGGAGGGGGSMGGGGSGFISGRRSRSASPSTQQEKHPTHHERGQKKSRKDKERLKQKHKKRPESPPSILTPPVVPTADKVSSSASSSSHHEASTQETSESSRESKGKKSSSHSLSHKGKKLSSGKGVSSFTSASSSSSSSSSSSGGPFQPAVSSLQSSPDFSAFPKLEQPEEDKYSKPTAPAPSAPPSPSAPEPPKADLFEQKVVFSGFGPIMRFSTTTSSSGRARAPSPGDYKSPHVTGSGASAGTHKRMPALSATPVPADETPETGLKEKKHKASKRSRHGPGRPKGSRNKEGTGGPAAPSLPSAQLAGFTATAASPFSGGSLVSSGLGGLSSRTFGPSGSLPSLSLESPLLGAGIYTSNKDPISHSGGMLRAVCSTPLSSSLLGPPGTSALPRLSRSPFTSTLPSSSASISTTQVFSLAGSTFSLPSTHIFGTPMGAVNPLLSQAESSHTEPDLEDCSFRCRGTSPQESLSSMSPISSLPALFDQTASAPCGGGQLDPAAPGTTNMEQLLEKQGDGEAGVNIVEMLKALHALQKENQRLQEQILSLTAKKERLQILNVQLSVPFPALPAALPAANGPVPGPYGLPPQAGSSDSLSTSKSPPGKSSLGLDNSLSTSSEDPHSGCPSRSSSSLSFHSTPPPLPLLQQSPATLPLALPGAPAPLPPQPQNGLGRAPGAAGLGAMPMAEGLLGGLAGSGGLPLNGLLGGLNGAAAPNPASLSQAGGAPTLQLPGCLNSLTEQQRHLLQQQEQQLQQLQQLLASPQLTPEHQTVVYQMIQQIQQKRELQRLQMAGGSQLPMASLLAGSSTPLLSAGTPGLLPTASAPPLLPAGALVAPSLGNNTSLMAAAAAAAAVAAAGGPPVLTAQTNPFLSLSGAEGSGGGPKGGTADKGASANQEKG

SEQ ID NO: 3022 - protein, 725 aa, Homo sapiens
MDDSDTPTYYLQIEPQDGCHPGDSVERSVTCLPSASDENENQLDGDGHEHLTSSDSAMGKPQVSEQDSLNNNESCTLSCEVAAGENSQNTLCEASRDEQAFLGKDKKIPGKRSPRSKKGTAKKIPPGLFSGDIAPLMQEKVLSAVTYAVDDEEAAEVNANEQPEAPKLVLQSLFSLIRGEVEQLDSRALPLCLHQIAESYFQEEDYEKAMKFIQLERLYHEQLLANLSAIQEQWETKWKTVQPHTVTALRNSEKGFNGEDFERLTKICATHQDPLLSKHKIAAVEKSQERKCSTQLLVSEDPKEGGATTKESESKTCLGTESSKESQHTVEPLGSSPCCHQMDVQTDSPSLSVTAGKDHMEELLCSAEATLALHTQSSETAGSPSGPDSSEDACEDDSRLQLAQTEACQDVARIEGIAEDPKVFLSSKSKTEPLISPGCDRIPPALISEGKYSQAQRKELRLPLRDASEALPTDQLENNELNELQQPDLTDSDGKSPQAQADSDGSENVLCGNNQISDLGILLPEVCMAPEEKGDKDDQLNKETEDYLNSLLEGCLKDTEDSLSYEDNQDDDSDLLQDLSPEEASYSLQENLPSDESCLSLDDLAKRIEIAEVVPTEGLVSILKKRNDTVGDHPAQMQHKPSKRRVRFQEIDDSLDQDEVGGGSCILLVLLCIATVFLSVGGTALYCTFGDMESPVCTDFADNMDFYYTKLLQGVAELKHWIYLS

SEQ ID NO: 3023 - protein, 616 aa, Homo sapiens
MGRIGISCLFPASWHFSISPVGCPRILNTNLRQIMVISVLAAAVSLLYFSVVIIRNKYGRLTRDKKFQRYLARVTDIEATDTNNPNVNYGIVVDCGSSGSRVFVYCWPRHNGNPHDLLDIRQMRDKNRKPVVMKIKPGISEFATSPEKVSDYISPLLNFAAEHVPRAKHKETPLYILCTAGMRILPESQQKAILEDLLTDIPVHFDFLFSDSHAEVISGKQEGVYAWIGINFVLGRFEHIEDDDEAVVEVNIPGSESSEAIVRKRTAGILDMGGVSTQIAYEVPKTVSFASSQQEEVAKNLLAEFNLGCDVHQTEHVYRVYVATFLGFGGNAARQRYEDRIFANTIQKNRLLGKQTGLTPDMPYLDPCLPLDIKDEIQQNGQTIYLRGTGDFDLCRETIQPFMNKTNETQTSLNGVYQPPIHFQNSEFYGFSEFYYCTEDVLRMGGDYNAAKFTKAAKDYCATKWSILRERFDRGLYASHADLHRLKYQCFKSAWMFEVFHRGFSFPVNYKSLKTALQVYDKEVQWTLGAILYRTRFLPLRDIQQEAFRASHTHWRGVSFVYNHYLFSGCFLVVLLAILLYLLRLRRIHRRTPRSSSAAALWMEEGLPAQNAPGTL

SEQ ID NO: 3024 - protein, 735 aa, Homo sapiens
MAKERGLISPSDFAQLQKYMEYSTKKVSDVLKLFEDGEMAKYVQGDAIGYEGFQQFLKIYLEVDNVPRHLSLALFQSFETGHCLNETNVTKDVVCLNDVSCYFSLLEGGRPEDKLEFTFKLYDTDRNGILDSSEVDKIILQMMRVAEYLDWDVSELRPILQEMMKEIDYDGSGSVSQAEWVRAGATTVPLLVLLGLEMTLKDDGQHMWRPKRFPRPVYCNLCESSIGLGKQGLSCNLCKYTVHDQCAMKALPCEVSTYAKSRKDIGVQSHVWVRGGCESGRCDRCQKKIRIYHSLTGLHCVWCHLEIHDDCLQAVGHECDCGLLRDHILPPSSIYPSVLASGPDRKNSKTSQKTMDDLNLSTSEALRIDPVPNTHPLLVFVNPKSGGKQGQRVLWKFQYILNPRQVFNLLKDGPEIGLRLFKDVPDSRILVCGGDGTVGWILETIDKANLPVLPPVAVLPLGTGNDLARCLRWGGGYEGQNLAKILKDLEMSKVVHMDRWSVEVIPQQTEEKSDPVPFQIINNYFSIGVDASIAHRFHIMREKYPEKFNSRMKNKLWYFEFATSESIFSTCKKLEESLTVEICGKPLDLSNLSLEGIAVLNIPSMHGGSNLWGDTRRPHGDIYGINQALGATAKVITDPDILKTCVPDLSDKRLEVVGLEGAIEMGQIYTKLKNAGRRLAKCSEITFHTTKTLPMQIDGEPWMQTPCTIKITHKNQMPMLMGPPPRSTNFFGFLS

SEQ ID NO: 3025 - protein, 735 aa, Homo sapiens; identical to SEQ ID NO: 3024

SEQ ID NO: 3026 - protein, 735 aa, Homo sapiens; identical to SEQ ID NO: 3024

SEQ ID NO: 3027 - protein, 735 aa, Homo sapiens; identical to SEQ ID NO: 3024

SEQ ID NO: 3028 - protein, 305 aa, Homo sapiens
MAPLDLDKYVEIARLCKYLPENDLKRLCDYVCDLLLEESNVQPVSTPVTVCGDIHGQFYDLCELFRTGGQVPDTNYIFMGDFVDRGYYSLETFTYLLALKAKWPDRITLLRGNHESRQITQVYGFYDECQTKYGNANAWRYCTKVFDMLTVAALIDEQILCVHGGLSPDIKTLDQIRTIERNQEIPHKGAFCDLVWSDPEDVDTWAISPRGAGWLFGAKVTNEFVHINNLKLICRAHQLVHEGYKFMFDEKLVTVWSAPNYCYRCGNIASIMVFKDVNTREPKLFRAVPDSERVIPPRTTTPYFL

SEQ ID NO: 3029 - protein, 456 aa, Homo sapiens
MGITLIWCLALVLIKWITSKRRGAISYDSSDQTALYIRMLGDVRVRSRAGFESERRGSHPYIDFRIFHSQSEIEVSVSARNIRRLLSFQRYLRSSRFFRGTAVSNSLNILDDDYNGQAKCMLEKVGNWNFDIFLFDRLTNGNSLVSLTFHLFSLHGLIEYFHLDMMKLRRFLVMIQEDYHSQNPYHNAVHAADVTQAMHCYLKEPKLANSVTPWDILLSLIAAATHDLDHPGVNQPFLIKTNHYLATLYKNTSVLENHHWRSAVGLLRESGLFSHLPLESRQQMETQIGALILATDISRQNEYLSLFRSHLDRGDLCLEDTRHRHLVLQMALKCADICNPCRTWELSKQWSEKVTEEFFHQGDIEKKYHLGVSPLCDRHTESIANIQIGFMTYLVEPLFTEWARFSNTRLSQTMLGHVGLNKASWKGLQREQSSSEDTDAAFELNSQLLPQENRLS

SEQ ID NO: 3030 - protein, 424 aa, Homo sapiens
MEVCYQLPVLPLDRPVPQHVLSRRGAISFSSSSALFGCPNPRQLSQRRGAISYDSSDQTALYIRMLGDVRVRSRAGFESERRGSHPYIDFRIFHSQSEIEVSVSARNIRRLLSFQRYLRSSRFFRGTAVSNSLNILDDDYNGQAKCMLEKVGNWNFDIFLFDRLTNGNSLVSLTFHLFSLHGLIEYFHLDMMKLRRFLVMIQEDYHSQNPYHNAVHAADVTQAMHCYLKEPKLANSVTPWDILLSLIAAATHDLDHPGVNQPFLIKTNHYLATLYKNTSVLENHHWRSAVGLLRESGLFSHLPLESRQQMETQIGALILATDISRQNEYLSLFRSHLDRGDLCLEDTRHRHLVLQMALKCADICNPCRTWELSKQWSEKVTEEFFHQGDIEKKYHLGVSPLCDRHTESIANIQIGNYTYLDIAG

SEQ ID NO: 3031 - protein, 1051 aa, Homo sapiens
MGSAEDAVKEKLLWNVKKEVKQIMEEAVTRKFVHEDSSHIIALCGAVEACLLHQLRRRAAGFMRSDKMAALFTKVGKTCPVAGEICHKVQELQQQAEGRKPSGVSQEALRRQGSASGKAPALSPQALKHVWVRTALIEKVLDKVVQYLAENCSKYYEKEALLADPVFGPILASLLVGPCALEYTKLKTADHYWTDPSADELVQRHRIRGPPTRQDSPAKRPALGIRKRHSSGSASEDKLAACASECVESLHQNSRTRLLYGKNHVLVQPKEDMEAVPGYLSLHQSAESLTLKWTPNQLMNGTLGDSELEKSVYWDYALVVPFSQVVCIRCHQQKSGGTLVLVSQDGIQRPPLHFPQGGHLLSFLSCLENGLLPQGQLEPPLWTQQGKGKVFPKLRKRSSIRSVDMEEMGTGRATDYVFRIIYPGHRHEHITINYHHLAASRAASVDDDEEEEDKLHAMLSMICSRNLTAPNPMKDAGDMIEMQGFGPSLPAWHLEPLCSQGSSCLSCSSSSSPHATPSHCSCIPDRLPLRLLCESMKRQIVSRAFYGWLAHCRHLSTVRTHLSALVHHSVIPPDRPPGASAGLTKDVWSKYQKDKKNYKELELLRQVYYGGIEHEIRKDVWPFLLGHYKFGMSKKEMEQVDAVVAARYQQVLAEWKACEVVVRQREREAHPATRTKFSSGSSIDSHVQRLIHRDSTISNDVFISVDDLEPPEPQDPEDSRPKPEQEAGPGTPGTAVVEQQHSVEFDSPDSGLPSSRNYSVASGIQSSLDEGQSVGFEEEDGGGEEGSSGPGPAAHTLREPQDPSQEKPQAGELEAGEELAAVCAAAYTIELLDTVALNLHRIDKDVQRCDRNYWYFTPPNLERLRDVMCSYVWEHLDVGYVQGMCDLLAPLLVTLDNDQLAYSCFSHLMKRMSQNFPNGGAMDTHFANMRSLIQILDSELFELMHQNGDYTHFYFCYRWFLLDFKRELLYEDVFAVWEVIWAARHISSEHFVLFIALALVEAYREIIRDNNMVFTDIIKFFNERAEHHDAQEILRIARDLVHKVQMLIENK

SEQ ID NO: 3032 - protein, 683 aa, Homo sapiens
MALSKRELDELKPWIEKTVKRVLGFSEPTVVTAALNCVGKGMDKKKAADHLKPFLDDSTLRFVDKLFEAVEEGRSSRHSKSSSDRSRKRELKEVFGDDSEISKESSGVKKRRIPRFEEVEEEPEVIPGPPSESPGMLTKLQIKQMMEAATRQIEERKKQLSFISPPTPQPKTPSSSQPERLPIGNTIQPSQAATFMNDAIEKARKAAELQARIQAQLALKPGLIGNANMVGLANLHAMGIAPPKVELKDQTKPTPLILDEQGRTVDATGKEIELTHRMPTLKANIRAVKREQFKQQLKEKPSEDMESNTFFDPRVSIAPSQRQRRTFKFHDKGKFEKIAQRLRTKAQLEKLQAEISQAARKTGIHTSTRLALIAPKKELKEGDIPEIEWWDSYIIPNGFDLTEENPKREDYFGITNLVEHPAQLNPPVDNDTPVTLGVYLTKKEQKKLRRQTRREAQKELQEKVRLGLMPPPEPKVRISNLMRVLGTEAVQDPTKVEAHVRAQMAKRQKAHEEANAARKLTAEQRKVKKIKKLKEDISQGVHISVYRVRNLSNPAKKFKIEANAGQLYLTGVVVLHKDVNVVVVEGGPKAQKKFKRLMLHRIKWDEQTSNTKGDDDEESDEEAVKKTNKCVLVWEGTAKDRSFGEMKFKQCPTENMAREHFKKHGAEHYWDLALSESVLESTD

SEQ ID NO: 3033 - protein, 410 aa, Homo sapiens
MGTCWGDISENVRVEVPNTDCSLPTKVFWIAGIVKLAGYNALLRYEGFENDSGLDFWCNICGSDIHPVGWCAASGKPLVPPRTIQHKYTNWKAFLVKRLTGAKTLPPDFSQKVSESMQYPFKPCMRVEVVDKRHLCRTRVAVVESVIGGRLRLVYEESEDRTDDFWCHMHSPLIHHIGWSRSIGHRFKRSDITKKQDGHFDTPPHLFAKVKEVDQSGEWFKEGMKLEAIDPLNLSTICVATIRKVLADGFLMIGIDGSEAADGSDWFCYHATSPSIFPVGFCEINMIELTPPRGYTKLPFKWFDYLRETGSIAAPVKLFNKDVPNHGFRVGMKLEAVDLMEPRLICVATVTRIIHRLLRIHFDGWEEEYDQWVDCESPDLYPVGWCQLTGYQLQPPASQCKLVYRKGVLL

SEQ ID NO: 3034 - protein, 795 aa, Homo sapiens
MAVLLLLLRALRRGPGPGPRPLWGPGPAWSPGFPARPGRGRPYMASRPPGDLAEAGGRALQSLQLRLLTPTFEGINGLLLKQHLVQNPVRLWQLLGGTFYFNTSRLKQKNKEKDKSKGKAPEEDEEERRRRERDDQMYRERLRTLLVIAVVMSLLNALSTSGGSISWNDFVHEMLAKGEVQRVQVVPESDVVEVYLHPGAVVFGRPRLALMYRMQVANIDKFEEKLRAAEDELNIEAKDRIPVSYKRTGFFGNALYSVGMTAVGLAILWYVFRLAGMTGREGGFSAFNQLKMARFTIVDGKMGKGVSFKDVAGMHEAKLEVREFVDYLKSPERFLQLGAKVPKGALLLGPPGCGKTLLAKAVATEAQVPFLAMAGPEFVEVIGGLGAARVRSLFKEARARAPCIVYIDEIDAVGKKRSTTMSGFSNTEEEQTLNQLLVEMDGMGTTDHVIVLASTNRADILDGALMRPGRLDRHVFIDLPTLQERREIFEQHLKSLKLTQSSTFYSQRLAELTPGFSGADIANICNEAALHAAREGHTSVHTLNFEYAVERVLAGTAKKSKILSKEEQKVVAFHESGHALVGWMLEHTEAVMKVSITPRTNAALGFAQMLPRDQHLFTKEQLFERMCMALGGRASEALSFNEVTSGAQDDLRKVTRIAYSMVKQFGMAPGIGPISFPEAQEGLMGIGRRPFSQGLQQMMDHEARLLVAKAYRHTEKVLQDNLDKLQALANALLEKEVINYEDIEALIGPPPHGPKKMIAPQRWIDAQREKQDLGEEETEETQQPPLGGEEPTWPK

SEQ ID NO: 3035 - protein, 489 aa, Homo sapiens
MAVLLLLLRALRRGPGPGPRPLWGPGPAWSPGFPARPGRGRPYMASRPPGDLAEAGGRALQSLQLRLLTPTFEGINGLLLKQHLVQNPVRLWQLLGGTFYFNTSRLKQKNKEKDKSKGKAPEEDEEERRRRERDDQMYRERLRTLLVIAVVMSLLNALSTSGGSISWNDFVHEMLAKGEVQRVQVVPESDVVEVYLHPGAVVFGRPRLALMYRMQVANIDKFEEKLRAAEDELNIEAKDRIPVSYKRTGFFGNALYSVGMTAVGLAILWYVFRLAGMTGREGGFSAFNQLKMARFTIVDGKMGKGVSFKDVAGMHEAKLEVREFVDYLKSPERFLQLGAKVPKGALLLGPPGCGKTLLAKAVATEAQVPFLAMAGPEFVEVIGGLGAARVRSLFKEARARAPCIVYIDEIDAVGKKRSTTMSGFSNTEEEQTLNQLLVEMDGASLDQLPSQGTMRKLRGKTPACSCLTEPTGSRRAMEGHSLCWGCLLH

SEQ ID NO: 3036 - protein, 181 aa, Homo sapiens
MEQRPRGCAAVAAALLLVLLGARAQGGTRSPRCDCAGDFHKKIGLFCCRGCPAGHYLKAPCTEPCGNSTCLVCPQDTFLAWENHHNSECARCQACDEQASQVALENCSAVADTRCGCKPGWFVECQVSQCVSSSPFYCQPCLDCGALHRHTRLLCSRRDTDCGTCLPGFYEHGDGCVSCPT

SEQ ID NO: 3037 - protein, 417 aa, Homo sapiens
MEQRPRGCAAVAAALLLVLLGARAQGGTRSPRCDCAGDFHKKIGLFCCRGCPAGHYLKAPCTEPCGNSTCLVCPQDTFLAWENHHNSECARCQACDEQASQVALENCSAVADTRCGCKPGWFVECQVSQCVSSSPFYCQPCLDCGALHRHTRLLCSRRDTDCGTCLPGFYEHGDGCVSCPTSTLGSCPERCAAVCGWRQMFWVQVLLAGLVVPLLLGATLTYTYRHCWPHKPLVTADEAGMEALTPPPATHLSPLDSAHTLLAPPDSSEKICTVQLVGNSWTPGYPETQEALCPQVTWSWDQLPSRALGPAAAPTLSPESPAGSPAMMLQPGPQLYDVMDAVPARRWKEFVRTLGLREAEIEAVEVEIGRFRDQQYEMLKRWRQQQPAGLGAVYAALERMGLDGCVEDLRSRLQRGP

SEQ ID NO: 3038 - protein, 426 aa, Homo sapiens
MEQRPRGCAAVAAALLLVLLGARAQGGTRSPRCDCAGDFHKKIGLFCCRGCPAGHYLKAPCTEPCGNSTCLVCPQDTFLAWENHHNSECARCQACDEQASQVALENCSAVADTRCGCKPGWFVECQVSQCVSSSPFYCQPCLDCGALHRHTRLLCSRRDTDCGTCLPGFYEHGDGCVSCPTPPPSLAGAPWGAVQSAVPLSVAGGRVGVFWVQVLLAGLVVPLLLGATLTYTYRHCWPHKPLVTADEAGMEALTPPPATHLSPLDSAHTLLAPPDSSEKICTVQLVGNSWTPGYPETQEALCPQVTWSWDQLPSRALGPAAAPTLSPESPAGSPAMMLQPGPQLYDVMDAVPARRWKEFVRTLGLREAEIEAVEVEIGRFRDQQYEMLKRWRQQQPAGLGAVYAALERMGLDGCVEDLRSRLQRGP

SEQ ID NO: 3039 - protein, 380 aa, Homo sapiens
MEQRPRGCAAVAAALLLVLLGARAQGGTRSPRCDCAGDFHKKIGLFCCRGCPAGHYLKAPCTEPCGNSTCLVCPQDTFLAWENHHNSECARCQACDEQASQVALENCSAVADTRCGCKPGWFVECQVSQCVSSSPFYCQPCLDCGALHRHTRLLCSRRDTDCGTCLPGFYEHGDGCVSCPTSTLGSCPERCAAVCGWRQNEAGMEALTPPPATHLSPLDSAHTLLAPPDSSEKICTVQLVGNSWTPGYPETQEALCPQVTWSWDQLPSRALGPAAAPTLSPESPAGSPAMMLQPGPQLYDVMDAVPARRWKEFVRTLGLREAEIEAVEVEIGRFRDQQYEMLKRWRQQQPAGLGAVYAALERMGLDGCVEDLRSRLQRGP

SEQ ID NO: 3040 - protein, 372 aa, Homo sapiens
MEQRPRGCAAVAAALLLVLLGARAQGGTRSPRCDCAGDFHKKIGLFCCRGCPAASQVALENCSAVADTRCGCKPGWFVECQVSQCVSSSPFYCQPCLDCGALHRHTRLLCSRRDTDCGTCLPGFYEHGDGCVSCPTSTLGSCPERCAAVCGWRQMFWVQVLLAGLVVPLLLGATLTYTYRHCWPHKPLVTADEAGMEALTPPPATHLSPLDSAHTLLAPPDSSEKICTVQLVGNSWTPGYPETQEALCPQVTWSWDQLPSRALGPAAAPTLSPESPAGSPAMMLQPGPQLYDVMDAVPARRWKEFVRTLGLREAEIEAVEVEIGRFRDQQYEMLKRWRQQQPAGLGAVYAALERMGLDGCVEDLRSRLQRGP

SEQ ID NO: 3041 - protein, 234 aa, Homo sapiens
MEQRPRGCAAVAAALLLVLLGARAQGGTRSPRCDCAGDFHKKIGLFCCRGCPADEAGMEALTPPPATHLSPLDSAHTLLAPPDSSEKICTVQLVGNSWTPGYPETQEALCPQVTWSWDQLPSRALGPAAAPTLSPESPAGSPAMMLQPGPQLYDVMDAVPARRWKEFVRTLGLREAEIEAVEVEIGRFRDQQYEMLKRWRQQQPAGLGAVYAALERMGLDGCVEDLRSRLQRGP

SEQ ID NO: 3042 - protein, 411 aa, Homo sapiens
MKAARFVLRSAGSLNGAGLVPREVEHFSRYSPSPLSMKQLLDFGSENACERTSFAFLRQELPVRLANILKEIDILPTQLVNTSSVQLVKSWYIQSLMDLVEFHEKSPDDQKALSDFVDTLIKVRNRHHNVVPTMAQGIIEYKDACTVDPVTNQNLQYFLDRFYMNRISTRMLMNQHILIFSDSQTGNPSHIGSIDPNCDVVAVVQDAFECSRMLCDQYYLSSPELKLTQVNGKFPDQPIHIVYVPSHLHHMLFELFKNAMRATVEHQENQPSLTPIEVIVVLGKEDLTIKISDRGGGVPLRIIDRLFSYTYSTAPTPVMDNSRNAPLAGFGYGLPISRLYAKYFQGDLNLYSLSGYGTDAIIYLKALSSESIEKLPVFNKSAFKHYQMSSEADDWCIPSREPKNLAKEVAM

SEQ ID NO: 3043 - protein, 220 aa, Homo sapiens
MTTMQGMEQAMPGAGPGVPQLGNMAVIHSHLWKGLQEKFLKGEPKVLGVVQILTALMSLSMGITMMCMASNTYGSNPISVYIGYTIWGSVMFIISGSLSIAAGIRTTKGLVRGSLGMNITSSVLAASGILINTFSLAFYSFHHPYCNYYGNSNNCHGTMSILMGLDGMVLLLSVLEFCIAVSLSAFGCKVLCCTPGGVVLILPSHSHMAETASPTPLNEV

SEQ ID NO: 3044 - protein, 239 aa, Homo sapiens [sequence omitted]

SEQ ID NO: 3045 - protein, 446 aa, Homo sapiens
MAQALGEDLVQPPELQDDSSSLGSDSELSGPGPYRQADRYGFIGGSSAEPGPGHPPADLIRQREMKWVEMTSHWEKTMSRRYKKVKMQCRKGIPSALRARCWPLLCGAHVCQKNSPGTYQELAEAPGDPQWMETIGRDLHRQFPLHEMFVSPQGHGQQGLLQVLKAYTLYRPEQGYCQAQGPVAAVLLMHLPPEEAFWCLVQICEVYLPGYYGPHMEAVRLDAEVFMALLRRLLPHVHKHLQQVGVGPLLYLPEWFLCLFARSLPFPTVLRVWDAFLSEGARVLFRVGLTLVRLALGTAEQRGACPGLLETLGALRAIPPAQLQEEAFMSQVHSVVLSERDLQREIKAQLAQLPDSAPGPPPRPQVRLAGAQAIFEAQQLAGVRRGAKPEVPRIVVQPPEEPRPPRRKPQTRGKTFHGLLTRARGPPIEGPPRPQRGSTSFLDTRF

SEQ ID NO: 3046 - protein, 396 aa, Homo sapiens
MGERKGVNKYYPPDFNPEKHGSLNRYHNSHPLRERARKLSQGILIIRFEMPYNIWCDGCKNHIGMGVRYNAEKKKVGNYYTTPIYRFRMKCHLCVNYIEMQTDPANCDYVIVSGAQRKEERWDMADNEQVLTTEHEKKQKLETDAMFRLEHGEADRSTLKKALPTLSHIQEAQSAWKDDFALNSMLRRRFREKKKAIQEEEERDQALQAKASLTIPLVPETEDDRKLAALLKFHTLDSYEDKQKLKRTEIISRSWFPSAPGSASSSKVSGVLKKLAQSRRTALATSPITVGDLGIVRRRSRDVPESPQHAADTPKSGEPRVPEEAAQDRPMSPGDCPPETTETPKCSSPRGQEGSRQDKPLSPAGSSQEAADTPDTRHPCSLGSSLVADYSDSESE

SEQ ID NO: 3047 - protein, 593 aa, Homo sapiens
MAFRRAEGTSMIQALAMTVAEIPVFLYTTFGQSAFSQLRLTPGLRKVLFATALGTVALALAAHQLKRRRRRKKQVGPEMGGEQLGTVPLPILLARKVPSVKKGYSSRRVQSPSSKSNDTLSGISSIEPSKHSGSSHSVASMMAVNSSSPTAACSGLWDARGMEESLTTSDGNAESLYMQGMELFEEALQKWEQALSVGQRGDSGSTPMPRDGLRNPETASEPLSEPESQRKEFAEKLESLLHRAYHLQEEFGSTFPADSMLLDLERTLMLPLTEGSLRLRADDEDSLTSEDSFFSATELFESLQTGDYPIPLSRPAAAYEEALQLVKEGRVPCRTLRTELLGCYSDQDFLAKLHCVRQAFEGLLEDKSNQLFFGKVGRQMVTGLMTKAEKSPKGFLESYEEMLSYALRPETWATTRLELEGRGVVCMSFFDIVLDFILMDAFEDLENPPASVLAVLRNRWLSDSFKETALATACWSVLKAKRRLLMVPDGFISHFYSVSEHVSPVLAFGFLGPKPQLAEVCAFFKHQIVQYLRDMFDLDNVRYTSLPALADDILQLSRRRSEILLGYLGVPAASSAGVNGALPRENGPLGELQ

SEQ ID NO: 3048 - protein, 639 aa, Homo sapiens
MATGANATPLDFPSKKRKRSRWNQDTMEQKTVIPGMPTVIPPGLTREQERAYIVQLQIEDLTRKLRTGDLGIPPNPEDRSPSPEPIYNSEGKRLNTREFRTRKKLEEERHNLITEMVALNPDFKPPADYKPPATRVSDKVMIPQDEYPEINFVGLLIGPRGNTLKNIEKECNAKIMIRGKGSVKEGKVGRKDGQMLPGEDEPLHALVTANTMENVKKAVEQIRNILKQGIETPEDQNDLRKMQLRELARLNGTLREDDNRILRPWQSSETRSITNTTVCTKCGGAGHIASDCKFQRPGDPQSAQDKARMDKEYLSLMAELGEAPVPASVGSTSGPATTPLASAPRPAAPANNPPPPSLMSTTQSRPPWMNSGPSESRPYHGMHGGGPGGPGGGPHSFPHPLPSLTGGHGGHPMQHNPNGPPPPWMQPPPPPMNQGPHPPGHHGPPPMDQYLGSTPVGSGVYRLHQGKGMMPPPPMGMMPPPPPPPSGQPPPPPSGPLPPWQQQQQQPPPPPPPSSSMASSTPLPWQQNTTTTTTSAGTGSIPPWQQQQAAAAASPGAPQMQGNPTMVPLPPGVQPPLPPGAPPPPPPPPPGSAGMMYAPPPPPPPPMDPSNFVTMMGMGVAGMPPFGMPPAPPPPPPQN

SEQ ID NO: 3049 - protein, 638 aa, Homo sapiens
MATGANATPLDFPSKKRKRSRWNQDTMEQKTVIPGMPTVIPPGLTREQERAYIVQLQIEDLTRKLRTGDLGIPPNPEDRSPSPEPIYNSEGKRLNTREFRTRKKLEEERHNLITEMVALNPDFKPPADYKPPATRVSDKVMIPQDEYPEINFVGLLIGPRGNTLKNIEKECNAKIMIRGKGSVKEGKVGRKDGQMLPGEDEPLHALVTANTMENVKKAVEQIRNILKQGIETPEDQNDLRKMQLRELARLNGTLREDDNRILRPWQSSETRSITNTTVCTKCGGAGHIASDCKFQRPGDPQSAQDKARMDKEYLSLMAELGEAPVPASVGSTSGPATTPLASAPRPAAPANNPPPPSLMSTTQSRPPWMNSGPSESRPYHGMHGGGPGGPGGGPHSFPHPLPSLTGGHGGHPMQHNPNGPPPPWMQPPPPPMNQGPHPPGHHGPPPMDQYLGSTPVGSGVYRLHQGKGMMPPPPMGMMPPPPPPPSGQPPPPPSGPLPPWQQQQQQPPPPPPPSSSMASSTPLPWQQNTTTTTTSAGTGSIPPWQQQQAAAAASPGAPQMQGNPTMVPLPPGVQPPLPPGAPPPPPPPPPGSAGMMIPPRGGDGPSHESEDFPRPLVTLPGRQPQQRPWWTGWFGKAA

SEQ ID NO: 3050 - protein, 80 aa, Homo sapiens
MATGANATPLDFPSKKRKRSRWNQDTMEQKTVIPGMPTVIPPGLTREQERAYIGKYTFCIQMHFEIVTIYSEQDLHFLKV

SEQ ID NO: 3051 - protein, 548 aa, Homo sapiens
MATGANATPLDFPSKKRKRSRWNQDTMEQKTVIPGMPTVIPPGLTREQERAYIVQLQIEDLTRKLRTGDLGIPPNPEDRSPSPEPIYNSEGKRLNTREFRTRKKLEEERHNLITEMVALNPDFKPPADYKPPATRVSDKVMIPQDEYPEINFVGLLIGPRGNTLKNIEKECNAKIMIRGKGSVKEGKVGRKDGQMLPGEDEPLHALVTANTMENVKKAVEQIRNILKQGIETPEDQNDLRKMQLRELARLNGTLREDDNRILRPWQSSETRSITNTTVCTKCGGAGHIASDCKFQRPGDPQSAQDKARMDKEYLSLMAELGEAPVPASVGSTSGPATTPLASAPRPAAPANNPPPPSLMSTTQSRPPWMNSGPSESRPYHGMHGGGPGGPGGGPHSFPHPLPSLTGGHGGHPMQHNPNGPPPPWMQPPPPPMNQGPHPPGHHGPPPMDQYLGSTPVGSGVYRLHQGKGMMPPPPMGMMPPPPPPPSGQPPPPPSGPLPPWQQQQQQPPPPPPPSSSMASSTPLPWQQRSLPAAAMARAMRVRTFRAHW

SEQ ID NO: 3052 - protein, 715 aa, Homo sapiens
MAANMYRVGDYVYFENSSSNPYLIRRIEELNKTANGNVEAKVVCFYRRRDISSTLIALADKHATLSVCYKAGPGADNGEEGEIEEEMENPEMVDLPEKLKHQLRHRELFLSRQLESLPATHIRGKCSVTLLNETESLKSYLEREDFFFYSLVYDPQQKTLLADKGEIRVGNRYQADITDLLKEGEEDGRDQSRLETQVWEAHNPLTDKQIDQFLVVARSVGTFARALDCSSSVRQPSLHMSAAAASRDITLFHAMDTLHKNIYDISKAISALVPQGGPVLCRDEMEEWSASEANLFEEALEKYGKDFTDIQQDFLPWKSLTSIIEYYYMWKTTDRYVQQKRLKAAEAESKLKQVYIPNYNKPNPNQISVNNVKAGVVNGTGAPGQSPGAGRACESCYTTQSYQWYSWGPPNMQCRLCASCWTYWKKYGGLKMPTRLDGERPGPNRSNMSPHGLPARSSGSPKFAMKTRQAFYLHTTKLTRIARRLCREILRPWHAARNPYLPINSAAIKAECTARLPEASQSPLVLKQAVRKPLEAVLRYLETHPRPPKPDPVKSVSSVLSSLTPAKVAPVINNGSPTILGKRSYEQHNGVDGNMKKRLLMPSRGLANHGQTRHMGPSRNLLLNGKSYPTKVRLIRGGSLPPVKRRRMNWIDAPGDVFYMPKEETRKIRKLLSSSETKRAARRPYKPIALRQSQALPPRPPPPAPVNDEPIVIED

SEQ ID NO: 3053 - protein, 933 aa, Homo sapiens
MESCYNPGLDGIIEYDDFKLNSSIVEPKEPAPETADGPYLVIVEQPKQRGFRFRYGCEGPSHGGLPGASSEKGRKTYPTVKICNYEGPAKIEVDLVTHSDPPRAHAHSLVGKQCSELGICAVSVGPKDMTAQFNNLGVLHVTKKNMMGTMIQKLQRQRLRSRPQGLTEAEQRELEQEAKELKKVMDLSIVRLRFSAFLRASDGSFSLPLKPVTSQPIHDSKSPGASNLKISRMDKTAGSVRGGDEVYLLCDKVQKDDIEVRFYEDDENGWQAFGDFSPTDVHKQYAIVFRTPPYHKMKIERPVTVFLQLKRKRGGDVSDSKQFTYYPLVEDKEEVQRKRRKALPTFSQPFGGGSHMGGGSGGAAGGYGGAGGGGSLGFFPSSLAYSPYQSGAGPMRCYPGGGGGAQMAATVPSRDSGEEAAEPSAPSRTPQCEPQAPEMLQRAREYNARLFGLAHAAPSPTRLLRHRGRRALLAGQRHLLTAQDENGDTPLHLAIIHGQTSVIEQIVYVIHHAQDLGVVNLTNHLHQTPLHLAVITGQTSVVSFLLRVGADPALLDRHGDSAMHLALRAGAGAPELLRALLQSGAPAVPQLLHMPDFEGLYPVHLAVRARSPECLDLLVDSGAEVEATERQGGRTALHLATEMEELGLVTHLVTKLRANVNARTFAGNTPLHLAAGLGYPTLTRLLLKAGADIHAENEEPLCPLPSPPTSDSDSDSEGPEKDTRSSFRGHTPLDLTCSTLVKTLLLNAAQNTMEPPLTPPSPAGPGLSLGDTALQNLEQLLDGPEAQGSWAELAERLGLRSLVDTYRQTTSPSGSLLRSYELAGGDLAGLLEALSDMGLEEGVRLLRGPETRDKLPSTEVKEDSAYGSQSVEQEAEKLGPPPEPPGGLSHGHPQPQVTDLLPAPSPLPGPPVQRPHLFQILFNTPHPPLSWDK

SEQ ID NO: 3054 - protein, 587 aa, Homo sapiens
MGWDLGTRLFQRQEQRSRLSRIWLEKTRVFLEGSTRTPALPHCLFWLLQVPSTQDPLFPGYGPQCPVDLAGPPCLRPLFGGLGGYWRALQRGREGRTMTSRASELSPGRSVTAGIIIVGDEILKGHTQDTNTFFLCRTLRSLGVQVCRVSVVPDEVATIAAEVTSFSNRFTHVLTAGGIGPTHDDVTFEAVAQAFGDELKPHPKLEAATKALGGEGWEKLSLVPSSARLHYGTDPCTGQPFRFPLVSVRNVYLFPGIPELLRRVLEGMKGLFQNPAVQFHSKELYVAADEASIAPILAEAQAHFGRRLGLGSYPDWGSNYYQVKLTLDSEEEGPLEECLAYLTARLPQGSLVPYMPNAVEQASEAVYKLAESGSSLGKKVAGALQTIETSLAQYSLTQLCVGFNGGKDCTALLHLFHAAVQRKLPDVPNPLQILYIRSISPFPELEQFLQDTIKRYNLQMLEAEGSMKQALGELQARHPQLEAVLMGTRRTDPYSCSLCPFSPTDPGWPAFMRINPLLDWTYRDIWDFLRQLFVPYCILYDRGYTSLGSRENTVRNPALKCLSPGGHPTYRPAYLLENEEEERNSRT

SEQ ID NO: 3055 - protein, 490 aa, Homo sapiens
MTSRASELSPGRSVTAGIIIVGDEILKGHTQDTNTFFLCRTLRSLGVQVCRVSVVPDEVATIAAEVTSFSNRFTHVLTAGGIGPTHDDVTFEAVAQAFGDELKPHPKLEAATKALGGEGWEKLSLVPSSARLHYGTDPCTGQPFRFPLVSVRNVYLFPGIPELLRRVLEGMKGLFQNPAVQFHSKELYVAADEASIAPILAEAQAHFGRRLGLGSYPDWGSNYYQVKLTLDSEEEGPLEECLAYLTARLPQGSLVPYMPNAVEQASEAVYKLAESGSSLGKKVAGALQTIETSLAQYSLTQLCVGFNGGKDCTALLHLFHAAVQRKLPDVPNPLQILYIRSISPFPELEQFLQDTIKRYNLQMLEAEGSMKQALGELQARHPQLEAVLMGTRRTDPYSCSLCPFSPTDPGWPAFMRINPLLDWTYRDIWDFLRQLFVPYCILYDRGYTSLGSRENTVRNPALKCLSPGGHPTYRPAYLLENEEEERNSRT

SEQ ID NO: 3056 - protein, 264 aa, Homo sapiens
MAGEQKPSSNLLEQFILLAKGTSGSALTALISQVLEAPGVYVFGELLELANVQELAEGANAAYLQLLNLFAYGTYPDYIANKESLPELSTAQQNKLKHLTIVSLASRMKCIPYSVLLKDLEMRNLRELEDLIIEAVYTDIIQGKLDQRNQLLEVDFCIGRDIRKKDINNIVKTLHEWCDGCEAVLLGIEQQVLRANQYKENHNRTQQQVEAEVTNIKKTLKATASSSAQEMEQQLAERECPPHAEQRQPTKKMSKVKGLVSSRH

SEQ ID NO: 3057 - protein, 98 aa, Homo sapiens
MIPGGLSEAKPATPEIQEIVDKVKPQLEEKTNETYGKLEAVQYKTQVVAGTNYYIKVRAGDNKYMHLKVFKSLPGQNEDLVLTGYQVDKNKDDELTGF

SEQ ID NO: 3058 - protein, 619 aa, Homo sapiens
MSHPDYRMNLRSLGTHRGVSAVAGPHDIGASPGDKKSKNRSTRGKKKSIFETYMSKEDVSEGLKRGTLIQGVLRINPKKFHEAFIPSPDGDRDIFIDGVVARNRALNGDLVVVKLLPEEHWKVVKPESNDKETEAAYESDIPEELCGHHLPQQSLKSYNDSPDVIVEAQFDGSDSEDGHGITQNVLVDGVKKLSVCVSEKGREDGDAPVTKDETTCISQDTRALSEKSLQRSAKVVYILEKKHSRAATGFLKLLADKNSELFRKYALFSPSDHRVPRIYVPLKDCPQDFVARPKDYANTLFICRIVDWKEDCNFALGQLAKSLGQAGEIEPETEGILTEYGVDFSDFSSEVLECLPQGLPWTIPPEEFSKRRDLRKDCIFTIDPSTARDLDDALSCKPLADGNFKVGVHIADVSYFVPEGSDLDKVAAERATSVYLVQKVVPMLPRLLCEELCSLNPMSDKLTFSVIWTLTPEGKILDEWFGRTIIRSCTKLSYEHAQSMIESPTEKIPAKELPPISPEHSSEEVHQAVLNLHGIAKQLRQQRFVDGALRLDQLKLAFTLDHETGLPQGCHIYEYRESNKPCCAGTPRPKQGCSVTWWNSATRWGCPWTSAPQEPSIKA

SEQ ID NO: 3059 - protein, 402 aa, Homo sapiens
MRSGGVRSFALELARGPGGAYRGGERLCGRVLLEAAAPLRVRALEVKARGGAATHWLEGRSVGVNAVSSDYAAAETYLRRRQLLLRDTGETTTLPPGRHEFLFSFQLPPTLVTSFEGKHGSVRYCIKATLHRPWVPARRARKVFTVIEPVDINTPALLAPQAGAREKVARSWYCNRGLVSLSAKIDRKGYTPGEVIPVFAEIDNGSTRPVLPRAAVVQTQTFMARGARKQKRAVVASLAGEPVGPGQRALWQGRALRIPPVGPSILHCRVLHVDYALKVCVDIPGTSKLLLELPLVIGTIPLHPFGSRSSSVGSHASFLLDWRLGALPERPEAPPEYSEVVADTEEAALGQSPFPLPQDPDMSLEGPFFAYIQEFRYRPPPLYSEEDPNPLLGDMRPRCMTC

SEQ ID NO: 3060 - protein, 407 aa, Homo sapiens
MLFDKVKAFSVQLDGATAGVEPVFSGGQAVAGRVLLELSSAARVGALRLRARGRAHVHWTESRSAGSSTAYTQSYSERVEVVSHRATLLAPDTGETTTLPPGRHEFLFSFQLPPTLVTSFEGKHGSVRYCIKATLHRPWVPARRARKVFTVIEPVDINTPALLAPQAGAREKVARSWYCNRGLVSLSAKIDRKGYTPGEVIPVFAEIDNGSTRPVLPRAAVVQTQTFMARGARKQKRAVVASLAGEPVGPGQRALWQGRALRIPPVGPSILHCRVLHVDYALKVCVDIPGTSKLLLELPLVIGTIPLHPFGSRSSSVGSHASFLLDWRLGALPERPEAPPEYSEVVADTEEAALGQSPFPLPQDPDMSLEGPFFAYIQEFRYRPPPLYSEEDPNPLLGDMRPRCMTC

SEQ ID NO: 3061 - protein, 118 aa, Homo sapiens
MSAPAQPPAEGTEGTAPGGGPPGPPPNMTSNRRLQQTQAQVEEVVDIIRVNVDKVLERDQKLSELDDRADALQAGASQFESSAAKLKRKYWWKNCKMMIMLGAICAIIVVVIVIYFFT

SEQ ID NO: 3062 - protein, 116 aa, Homo sapiens
MSAPAQPPAEGTEGTAPGGGPPGPPPNMTSNRRLQQTQAQVEEVVDIIRVNVDKVLERDQKLSELDDRADALQAGASQFESSAAKLKRKYWWKNCKMMIMLGAICAIIVVVIVRRD

SEQ ID NO: 3063 - protein, 117 aa, Homo sapiens
MSAPAQPPAEGTEGTAPGGGPPGPPPNMTSNRRLQQTQAQVEEVVDIIRVNVDKVLERDQKLSELDDRADALQAGASQFESSAAKLKRKYWWKNCKMMIMLGAICAIIVVVIVSKYR

SEQ ID NO: 3064 - protein, 468 aa, Homo sapiens
MADDAGLETPLCSEQFGSGEARGCRAAADGSLQWEVGGWRWWGLSRAFTVKPEGRDAGEVGASGAPSPPLSGLQAVFLPQGFPDSVSPDYLPYQLWDSVQAFASSLSGSLATQAVLLGIGVGNAKATVSAATATWLVKDSTGMLGRIVFAWWKGSKLDCNAKQWRLFADILNDVAMFLEIMAPVYPICFTMTVSTSNLAKCIVSVAGGATRAALTVHQARRNNMADVSAKDSSQETLVNLAGLLVSLLMLPLVSGCPGFSLGCFFFLTALHIYANYRAVRALVMETLNEGRLRLVLKHYLQRGEVLDPTAANRMEPLWTGFWPAPSLSLGVPLHRLVSSVFELQQLVEGHQESYLLCWDQSQNQVQVVLNQKAGPKTILRAATHGLMLGALQGDGPLPAELEELRNRVRAGPKKESWVVVKETHEVLDMLFPKFLKGLQDAGWKTEKHQLEVGEWRATWLLSPEKKVL

SEQ ID NO: 3065 - protein, 277 aa, Homo sapiens
MAADGERSPLLSEPIDGGAGGNGLVGPGGSGAGPGGGLTPSAPPYGAAFPPFPEGHPAVLPGEDPPPYSPLTSPDSGSAPMITCRVCQSLINVEGKMHQHVVKCGVCNEATPIKNAPPGKKYVRCPCNCLLICKVTSQRIACPRPYCKRIINLGPVHPGPLSPEPQPMGVRVICGHCKNTFLWTEFTDRTLARCPHCRKVSSIGRRYTRKRCICCFLLGLLLAVTATGLAFGTWKHARRYGGIYAAWAFVILLAVLCLGRALYWACMKVSHPVQNFS

SEQ ID NO: 3066 - protein, 207 aa, Homo sapiens
MRLNQNTLLLGKKVVLVPYTSEHVPSRYHEWMKSEELQRLTASEPLTLEQEYAMQCSWQEDADKCTFIVLDAEKWQAQPGATEESCMVGDVNLFLTDLEDLTLGEIEVMIAEPSCRGKGLGTEAVLAMLSYGVTTLGLTKFEAKIGQGNEPSIRMFQKLHFEQVATSSVFQEVTLRLTVSESEHQWLLEQTSHVEEKPYRDGSAEPC

SEQ ID NO: 3067 - protein, 676 aa, Homo sapiens
MDKYDDLGLEASKFIEDLNMYEASKDGLFRVDKGAGNNPEFEETRRVFATKMAKIHLQQQQQQLLQEETLPRGSRGPVNGGGRLGPQARWEVVGSKLTVDGAAKPPLAASTGAPGAVTTLAAGQPPYPPQEQRSRPYLHGTRHGSQDCGSRESLATSEMSAFHQPGPCEDPSCLTHGDYYDNLSLASPKWGDKPGVSPSIGLSVGSGWPSSPGSDPPLPKPCGDHPLNHRQLSLSSSRSSEGSLGGQNSGIGGRSSEKPTGLWSTASSQRVSPGLPSPNLENGAPAVGPVQPRTPSVSAPLALSCPRQGGLPRSNSGLGGEVSGVMSKPNVDPQPWFQDGPKSYLSSSAPSSSPAGLDGSQQGAVPGLGPKPGCTDLGTGPKLSPTSLVHPVMSTLPELSCKEGPLGWSSDGSLGSVLLDSPSSPRVRLPCQPLVPGPELRPSAAELKLEALTQRLEREMDAHPKADYFGACVKCSKGVFGAGQACQAMGNLYHDTCFTCAACSRKLRGKAFYFVNGKVFCEEDFLYSGFQQSADRCFLCGHLIMDMILQALGKSYHPGCFRCVICNECLDGVPFTVDSENKIYCVRDYHKVLAPKCAACGLPILPPEGSDETIRVVSMDRDYHVECYHCEDCGLELNDEDGHRCYPLEDHLFCHSCHVKRLEKRPSSTALHQHHF

SEQ ID NO: 3068 - protein, 468 aa, Homo sapiens
MAPPPARVHLGAFLAVTPNPGSAASGTEAAAATPSKVWGSSAGRIEPRGGGRGALPTSMGQHGPSARARAGRAPGPRPAREASPRLRVHKTFKFVVVGVLLQVVPSSAATIKLHDQSIGTQQWEHSPLGELCPPGSHRSEHPGACNRCTEGVGYTNASNNLFACLPCTACKSDEEERSPCTTTRNTACQCKPGTFRNDNSAEMCRKCSRGCPRGMVKVKDCTPWSDIECVHKESGNGHNIWVILVVTLVVPLLLVAVLIVCCCIGSGCGGDPKCMDRVCFWRLGLLRGPGAEDNAHNEILSNADSLSTFVSEQQMESQEPADLTGVTVQSPGEAQCLLGPAEAEGSQRRRLLVPANGADPTETLMLFFDKFANIVPFDSWDQLMRQLDLTKNEIDVVRAGTAGPGDALYAMLMKWVNKTGRNASIHTLLDALERMEERHAKEKIQDLLVDSGKFIYLEDGTGSAVSLE

SEQ ID NO: 3069 - protein, 236 aa, Homo sapiens
MKDQHLRGFFSDSTSFNILMDMLFIKGKYKSALQVLIEMKNQDVKFTKDTYVLAFAICYKLNSPESFKICTTLREEALLKGEILSRRASCFAVALALNQNEMAKAVSIFSQIMNPESIACINLNIIIHIQSNMLENLIKTLKNAAEGNLSKFVKRHVFSEEVLAKVREKVKDVPALVAKFDEIYGTLHITGQVTTDSLDAVLCHTPRDRKSHTLLLNKRMVSRRTFQPLSQSLLAE

SEQ ID NO: 3070 - protein, 765 aa, Homo sapiens
MPRSPGTRLKPAKYIPVATAAALLVGSSTLFFVFTCPWLTRAVSPAVPVYNGIIFLFVLANFSMATFMDPGVFPRADEDEDKEDDFRAPLYKNVDVRGIQVRMKWCATCHFYRPPRCSHCSVCDNCVEDFDHHCPWVNNCIGRRNYRYFFLFLLSLSAHMVGVVAFGLVYVLNHAEGLGAAHTTITMAVMCVAGLFFIPVIGLTGFHVVLVTRGRTTNEQVTGKFRGGVNPFTRGCCGNVEHVLCSPLAPRYVVEPPRLPLAVSLKPPFLRPELLDRAAPLKVKLSDNGLKAGLGRSKSKGSLDRLDEKPLDLGPPLPPKIEAGTFSSDLQTPRPGSAESALSVQRTSPPTPAMYKFRPAFPTGPKVPFCGPGEQVPGPDSLTLGDDSIRSLDFVSEPSLDLPDYGPGGLHAAYPPSPPLSASDAFSGALRSLSLKASSRRGGDHVALQPLRSEGGPPTPHRSIFAPHALPNRNGSLSYDSLLNPGSPGGHACPAHPAVGVAGYHSPYLHPGATGDPPRPLPRSFSPVLGPRPREPSPVRYDNLSRTIMASIQERKDREERERLLRSQADSLFGDSGVYDAPSSYSLQQASVLSEGPRGPALRYGSRDDLVAGPGFGGARNPALQTSLSSLSSSVSRAPRTSSSSLQADQASSNAPGPRPSSGSHRSPARQGLPSPPGTPHSPSYAGPKAVAFIHTDLPEPPPSLTVQRDHPQLKTPPSKLNGQSPGLARLGPATGPPGPSASPTRHTLVKKVSGVGGTTYEISV

SEQ ID NO: 3071 - protein, 276 aa, Homo sapiens
MSYGPLDMYRNPGPSGPQLRDFSSIIQTCSGNIQRISQATAQIKNLMSQLGTKQDSSKLQENLQQLQHSTNQLAKETNELLKELGSLPLPLSTSEQRQQRLQKERLMNDFSAALNNFQAVQRRVSEKEKESIARARAGSRLSAEERQREEQLVSFDSHEEWNQMQSQEDEVAITEQDLELIKERETAIRQLEADILDVNQIFKDLAMMIHDQGDLIDSIEANVESSEVHVERATEQLQRAAYYQKKSRKKMCILVLVLSVIILILGLIIWLVYKTK

SEQ ID NO: 3072 - protein, 533 aa, Homo sapiens
MSWAARPPFLPQRHAAGQCGPVGVRKEMHCGVASRWRRRRPWLDPAAAAAAAVAGGEQQTPEPEPGEAGRDGMGDSGRDSRSPDSSSPNPLPQGVPPPSPPGPPLPPSTAPSLGGSGAPPPPPMPPPPLGSPFPVISSSMGSPGLPPPAPPGFSGPVSSPQINSTVSLPGGGSGPPEDVKPPVLGVRGLHCPPPPGGPGAGKRLCAICGDRSSGKHYGVYSCEGCKGFFKRTIRKDLTYSCRDNKDCTVDKRQRNRCQYCRYQKCLATGMKREAVQEERQRGKDKDGDGEGAGGAPEEMPVDRILEAELAVEQKSDQGVEGPGGTGGSGSSPNDPVTNICQAADKQLFTLVEWAKRIPHFSSLPLDDQVILLRAGWNELLIASFSHRSIDVRDGILLATGLHVHRNSAHSAGVGAIFDRVLTELVSKMRDMRMDKTELGCLRAIILFNPDAKGLSNPSEVEVLREKVYASLETYCKQKYPEQQGRFAKLLLRLPALRSIGLKCLEHLFFFKLIGDTPIDTFLMEMLEAPHQLA

SEQ ID NO: 3073 - protein, 3969 aa, Homo sapiens
MAHSCRWRFPARPGTTGGGGGGGRRGLGGAPRQRVPALLLPPGPPVGGGGPGAPPSPPAVAAAAAAAGSSGAGVPGGAAAASAASSSSASSSSSSSSSASSGPALLRVGPGFDAALQVSAAIGTNLRRFRAVFGESGGGGGSGEDEQFLGFGSDEEVRVRSPTRSPSVKTSPRKPRGRPRSGSDRNSAILSDPSVFSPLNKSETKSGDKIKKKDSKSIEKKRGRPPTFPGVKIKITHGKDISELPKGNKEDSLKKIKRTPSATFQQATKIKKLRAGKLSPLKSKFKTGKLQIGRKGVQIVRRRGRPPSTERIKTPSGLLINSELEKPQKVRKDKEGTPPLTKEDKTVVRQSPRRIKPVRIIPSSKRTDATIAKQLLQRAKKGAQKKIEKEAAQLQGRKVKTQVKNIRQFIMPVVSAISSRIIKTPRRFIEDEDYDPPIKIARLESTPNSRFSAPSCGSSEKSSAASQHSSQMSSDSSRSSSPSVDTSTDSQASEEIQVLPEERSDTPEVHPPLPISQSPENESNDRRSRRYSVSERSFGSRTTKKLSTLQSAPQQQTSSSPPPPLLTPPPPLQPASSISDHTPWLMPPTIPLASPFLPASTAPMQGKRKSILREPTFRWTSLKHSRSEPQYFSSAKYAKEGLIRKPIFDNFRPPPLTPEDVGFASGFSASGTAASARLFSPLHSGTRFDMHKRSPLLRAPRFTPSEAHSRIFESVTLPSNRTSAGTSSSGVSNRKRKRKVFSPIRSEPRSPSHSMRTRSGRLSSSELSPLTPPSSVSSSLSISVSPLATSALNPTFTFPSHSLTQSGESAEKNQRPRKQTSAPAEPFSSSSPTPLFPWFTPGSQTERGRNKDKAPEELSKDRDADKSVEKDKSRERDREREKENKRESRKEKRKKGSEIQSSSALYPVGRVSKEKVVGEDVATSSSAKKATGRKKSSSHDSGTDITSVTLGDTTAVKTKILIKKGRGNLEKTNLDLGPTAPSLEKEKTLCLSTPSSSTVKHSTSSIGSMLAQADKLPMTDKRVASLLKKAKAQLCKIEKSKSLKQTDQPKAQGQESDSSETSVRGPRIKHVCRRAAVALGRKRAVFPDDMPTLSALPWEEREKILSSMGNDDKSSIAGSEDAEPLAPPIKPIKPVTRNKAPQEPPVKKGRRSRRCGQCPGCQVPEDCGVCTNCLDKPKFGGRNIKKQCCKMRKCQNLQWMPSKAYLQKQAKAVKKKEKKSKTSEKKDSKESSVVKNVVDSSQKPTPSAREDPAPKKSSSEPPPRKPVEEKSEEGNVSAPGPESKQATTPASRKSSKQVSQPALVIPPQPPTTGPPRKEVPKTTPSEPKKKQPPPPESGPEQSKQKKVAPRPSIPVKQKPKEKEKPPPVNKQENAGTLNILSTLSNGNSSKQKIPADGVHRIRVDFKEDCEAENVWEMGGLGILTSVPITPRVVCFLCASSGHVEFVYCQVCCEPFHKFCLEENERPLEDQLENWCCRRCKFCHVCGRQHQATKQLLECNKCRNSYHPECLGPNYPTKPTKKKKVWICTKCVRCKSCGSTTPGKGWDAQWSHDFSLCHDCAKLFAKGNFCPLCDKCYDDDDYESKMMQCGKCDRWVHSKCENLSDEMYEILSNLPESVAYTCVNCTERHPAEWRLALEKELQISLKQVLTALLNSRTTSHLLRYRQAAKPPDLNPETEESIPSRSSPEGPDPPVLTEVSKQDDQQPLDLEGVKRKMDQGNYTSVLEFSDDIVKIIQAAINSDGGQPEIKKANSMVKSFFIRQMERVFPWFSVKKSRFWEPNKVSSNSGMLPNAVLPPSLDHNYAQWQEREENSHTEQPPLMKKIIPAPKPKGPGEPDSPTPLHPPTPPILSTDRSREDSPELNPPPGIEDNRQCALCLTYGDDSANDAGRLLYIGQNEWTHVNCALWSAEVFEDDDGSLKNVHMAVIRGKQLRCEFCQKPGATVGCCLTSCTSNYHFMCSRAKNCVFLDDKKVYCQRHRDLIKGEVVPENGFEVFRRVFVDFEGISLRRKFLNGLEPENIHMMIGSMTIDCLGILNDLSDCEDKLFPIGYQCSRVYWSTTDARKRCVYTCKIVECRPPVVEPDINSTVEHDENRTIAHSPTSFTESSSKESQNTAEIISPPSPDRPPHSQTSGSCYYHVISKVPRIRTPSYSPTQRSPGCRPLPSAGSPTPTTHEIVTVGDPLLSSGLRSIGSRRHSTSSLSPQRSKLRIMSPMRTGNTYSRNNVSSVSTTGTATDLESSAKVVDHVLGPLNSSTSLGQNTSTSSNLQRTVVTVGNKNSHLDGSSSSEMKQSSASDLVSKSSSLKGEKTKVLSSKSSEGSAHNVAYPGIPKLAPQVHNTTSRELNVSKIGSFAEPSSVSFSSKEALSFPHLHLRGQRNDRDQHTDSTQSANSSPDEDTEVKTLKLSGMSNRSSIINEHMGSSSRDRRQKGKKSCKETFKEKHSSKSFLEPGQVTTGEEGNLKPEFMDEVLTPEYMGQRPCNNVSSDKIGDKGLSMPGVPKAPPMQVEGSAKELQAPRKRTVKVTLTPLKMENESQSKNALKESSPASPLQIESTSPTEPISASENPGDGPVAQPSPNNTSCQDSQSNNYQNLPVQDRNLMLPDGPKPQEDGSFKRRYPRRSARARSNMFFGLTPLYGVRSYGEEDIPFYSSSTGKKRGKRSAEGQVDGADDLSTSDEDDLYYYNFTRTVISSGGEERLASHNLFREEEQCDLPKISQLDGVDDGTESDTSVTATTRKSSQIPKRNGKENGTENLKIDRPEDAGEKEHVTKSSVGHKNEPKMDNCHSVSRVKTQGQDSLEAQLSSLESSRRVHTSTPSDKNLLDTYNTELLKSDSDNNNSDDCGNILPSDIMDFVLKNTPSMQALGESPESSSSELLNLGEGLGLDSNREKDMGLFEVFSQQLPTTEPVDSSVSSSISAEEQFELPLELPSDLSVLTTRSPTVPSQNPSRLAVISDSGEKRVTITEKSVASSESDPALLSPGVDPTPEGHMTPDHFIQGHMDADHISSPPCGSVEQGHGNNQDLTRNSSTPGLQVPVSPTVPIQNQKYVPNSTDSPGPSQISNAAVQTTPPHLKPATEKLIVVNQNMQPLYVLQTLPNGVTQKIQLTSSVSSTPSVMETNTSVLGPMGGGLTLTTGLNPSLPTSQSLFPSASKGLLPMSHHQHLHSFPAATQSSFPPNISNPPSGLLIGVQPPPDPQLLVSESSQRTDLSTTVATPSSGLKKRPISRLQTRKNKKLAPSSTPSNIAPSDVVSNMTLINFTPSQLPNHPSLLDLGSLNTSSHRTVPNIIKRSKSSIMYFEPAPLLPQSVGGTAATAAGTSTISQDTSHLTSGSVSGLASSSSVLNVVSMQTTTTPTSSASVPGHVTLTNPRLLGTPDIGSISNLLIKASQQSLGIQDQPVALPPSSGMFPQLGTSQTPSTAAITAASSICVLPSTQTTGITAASPSGEADEHYQLQHVNQLLASKTGIHSSQRDLDSASGPQVSNFTQTVDAPNSMGLEQNKALSSAVQASPTSPGGSPSSPSSGQRSASPSVPGPTKPKPKTKRFQLPLDKGNGKKHKVSHLRTSSSEAHIPDQETTSLTSGTGTPGAEAEQQDTASVEQSSQKECGQPAGQVAVLPEVQVTQNPANEQESAEPKTVEEEESNFSSPLMLWLQQEQKRKESITEKKPKKGLVFEISSDDGFQICAESIEDAWKSLTDKVQEARSNARLKQLSFAGVNGLRMLGILHDAVVFLIEQLSGAKHCRNYKFRFHKPEEANEPPLNPHGSARAEVHLRKSAFDMFNFLASKHRQPPEYNPNDEEEEEVQLKSARRATSMDLPMPMRFRHLKKTSKEAVGVYRSPIHGRGLFCKRNIDAGEMVIEYAGNVIRSIQTDKREKYYDSKGIGCYMFRIDDSEVVDATMHGNAARFINHSCEPNCYSRVINIDGQKHIVIFAMRKIYRGEELTYDYKFPIEDASNKLPCNCGAKKCRKFLN

SEQ ID NO: 3074 - protein, 339 aa, Homo sapiens
MKDSLVLLGRVPAHPDSRCWFLAWNPAGTLLASCGGDRRIRIWGTEGDSWICKSVLSEGHQRTVRKVAWSPCGNYLASASFDATTCIWKKNQDDFECVTTLEGHENEVKSVAWAPSGNLLATCSRDKSVWVWEVDEEDEYECVSVLNSHTQDVKHVVWHPSQELLASASYDDTVKLYREEEDDWVCCATLEGHESTVWSLAFDPSGQRLASCSDDRTVRIWRQYLPGNEQGVACSGSDPSWKCICTLSGFHSRTIYDIAWCQLTGALATACGDDAIRVFQEDPNSDPQQPTFSLTAHLHQAHSQDVNCVAWNPKEPGLLASCSDDGEVAFWKYQRPEGL

SEQ ID NO: 3075 - protein, 599 aa, Homo sapiens
MSGPCGEKPVLEASPTMSLWEFEDSHSRQGTPRPGQELAAEEASALELQMKVDFFRKLGYSSTEIHSVLQKLGVQADTNTVLGELVKHGTATERERQTSPDPCPQLPLVPRGGGTPKAPNLEPPLPEEEKEGSDLRPVVIDGSNVAMSHGNKEVFSCRGILLAVNWFLERGHTDITVFVPSWRKEQPRPDVPITDQHILRELEKKKILVFTPSRRVGGKRVVCYDDRFIVKLAYESDGIVVSNDTYRDLQGERQEWKRFIEERLLMYSFVNDKFMPPDDPLGRHGPSLDNFLRKKPLTLEHRKQPCPYGRKCTYGIKCRFFHPERPSCPQRSVADELRANALLSPPRAPSKDKNGRRPSPSSQSSSLLTESEQCSLDGKKLGAQASPGSRQEGLTQTYAPSGRSLAPSGGSGSSFGPTDWLPQTLDSLPYVSQDCLDSGIGSLESQMSELWGVRGGGPGEPGPPRAPYTGYSPYGSELPATAAFSAFGRAMGAGHFSVPADYPPAPPAFPPREYWSEPYPLPPPTSVLQEPPVQSPGAGRSPWGRADSLAKEQASVYTKLCGVFPPHLVEAVMGRFPQLLDPQQLAAEILSYKSQHPSE

SEQ ID NO: 3076 - protein, 245 aa, Homo sapiens
MASLAVSNWPKPMPLIPCLSWSTASGVFTTGVLSKPINWRELEKQYYTQTVYEEEIIHMLEYCGTDSFKMGQEFVKHFTSSADKLTNLNLVSRTLNLDISNQVVSQKPADCHNSSKTSVSATSEGLLLQDTSKMKRFNQTLSTNKSGYTSRNPQSYHLLSKEQSRNSLRKESLIFMKGVMDECTHVANFSVPVDPSLIIVVQAKEDAYIPRTGVRSLQEIWPGCEIRYLEGGHISAYLFKQGLFR

SEQ ID NO: 3077 - protein, 382 aa, Homo sapiens
MLRWTVHLEGGPRRVNHAAVAVGHRVYSFGGYCSGEDYETLRQIDVHIFNAVSLRWTKLPPVKSAIRGQAPVVPYMRYGHSTVLIDDTVLLWGGRNDTEGACNVLYAFDVNTHKWFTPRVSGTVPGARDGHSACVLGKIMYIFGGYEQQADCFSNDIHKLDTSTMTWTLICTKGSPARWRDFHSATMLGSHMYVFGGRADRFGPFHSNNEIYCNRIRVFDTRTEAWLDCPPTPVLPEGRRSHSAFGYNGELYIFGGYNARLNRHFHDLWKFNPVSFTWKKIEPKGKGPCPRRRQCCCIVGDKIVLFGGTSPSPEEGLGDEFDLIDHSDLHILDFSPSLKTLCKLAVIQYNLDQSCLPHDIRWELNAMTTNSNISRPIVSSHG

SEQ ID NO: 3078 - protein, 702 aa, Homo sapiens
MADSGLLLKRGSCRSTWLRVRKARPQLILSRRPRRRLGSLRWCGRRRLRRRLLQAQAAGVDWREGARQVSRAAAARRPNTATPSPIPSPTPASEPESEPELESASSCHRPLLIPPVRPVGPGRALLLLPVEQGFTFSGICRVTCLYGQVQVFGFTISQGQPAQDIFSVYTHSCLSIHALHYSQPEKSKKELKREARNLLKSHLNLDDRRWSMQNFSPQCSIVLLEHLKTATVNFITSYPGSSYIFVQESPTPQIKPEYLALRSVGIRREKKRKGLQLTESTLSALEELVNVSCEEVDGCPVILVCGSQDVGKSTFNRYLINHLLNSLPCVDYLECDLGQTEFTPPGCISLLNITEPVLGPPFTHLRTPQKMVYYGKPSCKNNYENYIDIVKYVFSAYKRESPLIVNTMGWVSDQGLLLLIDLIRLLSPSHVVQFRSDHSKYMPDLTPQYVDDMDGLYTKSKTKMRNRRFRLAAFADALEFADEEKESPVEFTGHKLIGVYTDFAFRITPRNRESHNKILRDLSILSYLSQLQPPMPKPLSPLHSLTPYQVPFNAVALRITHSDVAPTHILYAVNASWVGLCKIQDDVRGYTNGPILLAQTPICDCLGFGICRGIDMEKRLYHILTPVPPEELRTVNCLLVGAIAIPHCVLKCQRGIEGTVPYVTTDYNFKLPGASEKIGAREPEEAHKEKPYRRPKFCRKMK

SEQ ID NO: 3079 - protein, 378 aa, Homo sapiens
MDPGDDWLVESLRLYQDFYAFDLSGATRVLEWIDDKGVFVAGYESLKKNEILHLKLPLRLSVKENKGLFPERDFKVRHGGFSDRSIFDLKHVPHTRLLVTSGLPGCYLQVWQVAEDSDVIKAVSTIAVHEKEESLWPRVAVFSTLAPGVLHGARLRSLQVVDLESRKTTYTSDVSDSEELSSLQVLDADTFAFCCASGRLGLVDTRQKWAPLENRSPGPGSGGKRWCAEVGSWGQGPGPSIASLGSDGRLCLLDPRDLCHPVSSVQCPVSVPSPDPELLRVTWAPGLKNCLAISGFDGTVQVYDATSWDGTRSQDGTRSQVEPLFTHRGHIFLDGNGMDPAPLVTTHTWHPCRPRTLLSATNDASLHVWDWVDLCAPR

SEQ ID NO: 3080 - protein, 415 aa, Homo sapiens
MDFDKKGGKGETEEGRRMSKAGGGRSSHGIRSSGTSSGVLMVGPNFRVGKKIGCGNFGELRLGKNLYTNEYVAIKLEPIKSRAPQLHLEYRFYKQLSATEGVPQVYYFGPCGNYNAMVLELLGPSLEDLFDLCDRTFTLKTVLMIAIQLITRMEYVHTKSLIYRDVKPENFLVGRPGTKRQHAIHIIDFGLAKEYIDPETKKHIPYREHKSLTGTARYMSINTHLGKEQSRRDDLEALGHMFMYFLRGSLPWQGLKADTLKERYQKIGDTKRATPIEVLCENFPEEMATYLRYVRRLDFFEKPDYDYLRKLFTDLFDRSGFVFDYEYDWAGKPLPTPIGTVHTDLPSQPQLRDKTQPHSKNQALNSTNGELNADDPTAGHSNAPITAPAEVEVADETKCCCFFKRRKRKSLQRHK

SEQ ID NO: 3081 - protein, 335 aa, Homo sapiens
MPVEEFVAGWISGALGLVLGHPFDTVKLLGFFKGMSFPIASIAVVNSVLFGVYSNTLLVLTATSHQERRAQPPSYMHIFLAGCTGGFLQAYCLAPFDLIKVRLQNQTEPRAQPGSPPPRYQGPVHCAASIFREEGPRGLFRGAWALTLRDTPTVGIYFITYEGLCRQYTPEGQNPSSATVLVAGGLCRHCFLGGSHALRRDQVPDADGWTETQSVPGDAGLHGEQHPAGRTGSLLPGGHHQQCPRLSRQCCHLPQLRISPPLVGMSPAAMPAAPHQAHGLEASLRLEARLKACKSVQEAQPFLTKVPPTRADLGWADTCGSRKPGACAASLCSWP

SEQ ID NO: 3082 - protein, 323 aa, Homo sapiens
MSRPRMRLVVTADDFGYCPRRDEGIVEAFLAGAVTSVSLLVNGAATESAAELARRHSIPTGLHANLSEGRPVGPARRGASSLLGPEGFFLGKMGFREAVAAGDVDLPQVREELEAQLSCFRELLGRAPTHADGHQHVHVLPGVCQVFAEALQAYGVRFTRLPLERGVGGCTWLEAPARAFACAVERDARAAVGPFSRHGLRWTDAFVGLSTCGRHMSAHRVSGALARVLEGTLAGHTLTAELMAHPGYPSVPPTGGCGEGPDAFSCSWERLHELRVLTAPTLRAQLAQDGVQLCALDDLDSKRPGEEVPCEPTLEPFLEPSLL

SEQ ID NO: 3083 - protein, 136 aa, Homo sapiens
MSRPRMRLVVTADDFGYCPRRDEGIVEAFLAGAVTSVSLLVNGAATESAAELARRHSIPTGLHANLSEGRPVGPARRGASSLLGPEGFFLGKMGFREAVAAGDVDLPQVRSRSYRRMLARTPRAPPGGCGRSSRPN

SEQ ID NO: 3084 - protein, 437 aa, Homo sapiens
MADDPSAADRNVEIWKIKKLIKSLEAARGNGTSMISLIIPPKDQISRVAKMLADEFGTASNIKSRVNRLSVLGAITSVQQRLKLYNKVPPNGLVVYCGTIVTEEGKEKKVNIDFEPFKPINTSLYLCDNKFHTEALTALLSDDSKFGFIVIDGSGALFGTLQGNTREVLHKFTVDLPKKHGRGGQSALRFARLRMEKRHNYVRKVAETAVQLFISGDKVNVAGLVLAGSADFKTELSQSDMFDQRLQSKVLKLVDISYGGENGFNQAIELSTEVLSNVKFIQEKKLIGRYFDEISQDTGKYCFGVEDTLKALEMGAVEILIVYENLDIMRYVLHCQGTEEEKILYLTPEQEKDKSHFTDKETGQEHELIESMPLLEWFANNYKKFGATLEIVTDKSQEGSQFVKGFGGIGGILRYRVDFQGMEYQGGDDEFFDLDDY

SEQ ID NO: 3085 - protein, 157 aa, Homo sapiens
MSGFLEGLRCSECIDWGEKRNTIASIAAGVLFFTGWWIIIDAAVIYPTMKDFNHSYHACGVIATIAFLMINAVSNGQVRGDSYSEGCLGQTGARIWLFVGFMLAFGSLIASMWILFGGYVAKEKDIVYPGIAVFFQNAFIFFGGLVFKFGRTEDLWQ

SEQ ID NO: 3086 - protein, 4574 aa, Homo sapiens
MSGEDAEVRAVSEDVSNGSSGSPSPGDTLPWNLGKTQRSRRSGGGAGSNGSVLDPAERAVIRIADERDRVQKKTFTKWVNKHLIKAQRHISDLYEDLRDGHNLISLLEVLSGDSLPREKGRMRFHKLQNVQIALDYLRHRQVKLVNIRNDDIADGNPKLTLGLIWTIILHFQISDIQVSGQSEDMTAKEKLLLWSQRMVEGYQGLRCDNFTSSWRDGRLFNAIIHRHKPLLIDMNKVYRQTNLENLDQAFSVAERDLGVTRLLDPEDVDVPQPDEKSIITYVSSLYDAMPRVPDVQDGVRANELQLRWQEYRELVLLLLQWMRHHTAAFEERRFPSSFEEIEILWSQFLKFKEMELPAKEADKNRSKGIYQSLEGAVQAGQLKVPPGYHPLDVEKEWGKLHVAILEREKQLRSEFERLECLQRIVTKLQMEAGLCEEQLNQADALLQSDVRLLAAGKVPQRAGEVERDLDKADSMIRLLFNDVQTLKDGRHPQGEQMYRRVYRLHERLVAIRTEYNLRLKAGVAAPATQVAQVTLQSVQRRPELEDSTLRYLQDLLAWVEENQHRVDGAEWGVDLPSVEAQLGSHRGLHQSIEEFRAKIERARSDEGQLSPATRGAYRDCLGRLDLQYAKLLNSSKARLRSLESLHSFVAAATKELMWLNEKEEEEVGFDWSDRNTNMTAKKESYSALMRELELKEKKIKELQNAGDRLLREDHPARPTVESFQAALQTQWSWMLQLCCCIEAHLKENAAYFQFFSDVREAEGQLQKLQEALRRKYSCDRSATVTRLEDLLQDAQDEKEQLNEYKGHLSGLAKRAKAVVQLKPRHPAHPMRGRLPLLAVCDYKQVEVTVHKGDECQLVGPAQPSHWKVLSSSGSEAAVPSVCFLVPPPNQEAQEAVTRLEAQHQALVTLWHQLHVDMKSLLAWQSLRRDVQLIRSWSLATFRTLKPEEQRQALHSLELHYQAFLRDSQDAGGFGPEDRLMAEREYGSCSHHYQQLLQSLEQGAQEESRCQRCISELKDIRLQLEACETRTVHRLRLPLDKEPARECAQRIAEQQKAQAEVEGLGKGVARLSAEAEKVLALPEPSPAAPTLRSELELTLGKLEQVRSLSAIYLEKLKTISLVIRGTQGAEEVLRAHEEQLKEAQAVPATLPELEATKASLKKLRAQAEAQQPTFDALRDELRGAQEVGERLQQRHGERDVEVERWRERVAQLLERWQAVLAQTDVRQRELEQLGRQLRYYRESADPLGAWLQDARRRQEQIQAMPLADSQAVREQLRQEQALLEEIERHGEKVEECQRFAKQYINAIKDYELQLVTYKAQLEPVASPAKKPKVQSGSESVIQEYVDLRTHYSELTTLTSQYIKFISETLRRMEEEERLAEQQRAEERERLAEVEAALEKQRQLAEAHAQAKAQAEREAKELQQRMQEEVVRREEAAVDAQQQKRSIQEELQQLRQSSEAEIQAKARQAEAAERSRLRIEEEIRVVRLQLEATERQRGGAEGELQALRARAEEAEAQKRQAQEEAERLRRQVQDESQRKRQAEVELASRVKAEAEAAREKQRALQALEELRLQAEEAERRLRQAEVERARQVQVALETAQRSAEAELQSKRASFAEKTAQLERSLQEEHVAVAQLREEAERRAQQQAEAERAREEAERELERWQLKANEALRLRLQAEEVAQQKSLAQAEAEKQKEEAEREARRRGKAEEQAVRQRELAEQELEKQRQLAEGTAQQRLAAEQELIRLRAETEQGEQQRQLLEEELARLQREAAAATQKRQELEAELAKVRAEMEVLLASKARAEEESRSTSEKSKQRLEAEAGRFRELAEEAARLRALAEEAKRQRQLAEEDAARQRAEAERVLAEKLAAIGEATRLKTEAEIALKEKEAENERLRRLAEDEAFQRRRLEEQAAQHKADIEERLAQLRKASDSELERQKGLVEDTLRQRRQVEEEILALKASFEKAAAGKAELELELGRIRSNAEDTLRSKEQAELEAARQRQLAAEEERRRREAEERVQKSLAAEEEAARQRKAALEEVERLKAKVEEARRLRERAEQESARQLQLAQEAAQKRLQAEEKAHAFAVQQKEQELQQTLQQEQSVLDQLRGEAEAARRAAEEAEEARVQAEREAAQSRRQVEEAERLKQSAEEQAQARAQAQAAAEKLRKEAEQEAARRAQAEQAALRQKQAADAEMEKHKKFAEQTLRQKAQVEQELTTLRLQLEETDHQKNLLDEELQRLKAEATEAARQRSQVEEELFSVRVQMEELSKLKARIEAENRALILRDKDNTQRFLQEEAEKMKQVAEEAARLSVAAQEAARLRQLAEEDLAQQRALAEKMLKEKMQAVQEATRLKAEAELLQQQKELAQEQARRLQEDKEQMAQQLAEETQGFQRTLEAERQRQLEMSAEAERLKLRVAEMSRAQARAEEDAQRFRKQAEEIGEKLHRTELATQEKVTLVQTLEIQRQQSDHDAERLREAIAELEREKEKLQQEAKLLQLKSEEMQTVQQEQLLQETQALQQSFLSEKDSLLQRERFIEQEKAKLEQLFQDEVAKAQQLREEQQRQQQQMEQERQRLVASMEEARRRQHEAEEGVRRKQEELQQLEQQRRQQEELLAEENQRLREQLQLLEEQHRAALAHSEEVTASQVAATKTLPNGRDALDGPAAEAEPEHSFDGLRRKVSAQRLQEAGILSAEELQRLAQGHTTVDELARREDVRHYLQGRSSIAGLLLKATNEKLSVYAALQRQLLSPGTALILLEAQAASGFLLDPVRNRRLTVNEAVKEGVVGPELHHKLLSAERAVTGYKDPYTGQQISLFQAMQKGLIVREHGIRLLEAQIATGGVIDPVHSHRVPVDVAYRRGYFDEEMNRVLADPSDDTKGFFDPNTHENLTYLQLLERCVEDPETGLCLLPLTDKAAKGGELVYTDSEARDVFEKATVSAPFGKFQGKTVTIWEIINSEYFTAEQRRDLLRQFRTGRITVEKIIKIIITVVEEQEQKGRLCFEGLRSLVPAAELLESRVIDRELYQQLQRGERSVRDVAEVDTVRRALRGANVIAGVWLEEAGQKLSIYNALKKDLLPSDMAVALLEAQAGTGHIIDPATSARLTVDEAVRAGLVGPEFHEKLLSAEKAVTGYRDPYTGQSVSLFQALKKGLIPREQGLRLLDAQLSTGGIVDPSKSHRVPLDVACARGCLDEETSRALSAPRADAKAYSDPSTGEPATYGELQQRCRPDQLTGLSLLPLSEKAARARQEELYSELQARETFEKTPVEVPVGGFKGRTVTVWELISSEYFTAEQRQELLRQFRTGKVTVEKVIKILITIVEEVETLRQERLSFSGLRAPVPASELLASGVLSRAQFEQLKDGKTTVKDLSELGSVRTLLQGSGCLAGIYLEDTKEKVSIYEAMRRGLLRATTAALLLEAQAATGFLVDPVRNQRLYVHEAVKAGVVGPELHEQLLSAEKAVTGYRDPYSGSTISLFQAMQKGLVLRQHGIRLLEAQIATGGIIDPVHSHRVPVDVAYQRGYFSEEMNRVLADPSDDTKGFFDPNTHENLTYRQLLERCVEDPETGLRLLPLKGAEKAEVVETTQVYTEEETRRAFEETQIDIPGGGSHGGSTMSLWEVMQSDLIPEEQRAQLMADFQAGRVTKERMIIIIIEIIEKTEIIRQQGLASYDYVRRRLTAEDLFEARIISLETYNLLREGTRSLREALEAESAWCYLYGTGSVAGVYLPGSRQTLSIYQALKKGLLSAEVARLLLEAQAATGFLLDPVKGERLTVDEAVRKGLVGPELHDRLLSAERAVTGYRDPYTEQTISLFQAMKKELIPTEEALRLLDAQLATGGIVDPRLGFHLPLEVAYQRGYLNKDTHDQLSEPSEVRSYVDPSTDERLSYTQLLRRCRRDDGTGQLLLPLSDARKLTFRGLRKQITMEELVRSQVMDEATALQLREGLTSIEEVTKNLQKFLEGTSCIAGVFVDATKERLSVYQAMKKGIIRPGTAFELLEAQAATGYVIDPIKGLKLTVEEAVRMGIVGPEFKDKLLSAERAVTGYKDPYSGKLISLFQAMKKGLILKDHGIRLLEAQIATGGIIDPEESHRLPVEVAYKRGLFDEEMNEILTDPSDDTKGFFDPNTEENLTYLQLMERCITDPQTGLCLLPLKEKKRERKTSSKSSVRKRRVVIVDPETGKEMSVYEAYRKGLIDHQTYLELSEQECEWEEITISSSDGVVKSMIIDRRSGRQYDIDDAIAKNLIDRSALDQYRAGTLSITEFADMLSGNAGGFRSRSSSVGSSSSYPISPAVSRTQLASWSDPTEETGPVAGILDTETLEKVSITEAMHRNLVDNITGQRLLEAQACTGGIIDPSTGERFPVTDAVNKGLVDKIMVDRINLAQKAFCGFEDPRTKTKMSAAQALKKGWLYYEAGQRFLEVQYLTGGLIEPDTPGRVPLDEALQRGTVDARTAQKLRDVGAYSKYLTCPKTKLKISYKDALDRSMVEEGTGLRLLEAAAQSTKGYYSPYSVSGSGSTAGSRTGSRTGSRAGSRRGSFDATGSGFSMTFSSSSYSSSGYGRRYASGSSASLGGPESAVA

SEQ ID NO: 3087 - protein, 4533 aa, Homo sapiens
MAGPLPDEQDFIQAYEEVREKYKDERDRVQKKTFTKWVNKHLIKAQRHISDLYEDLRDGHNLISLLEVLSGDSLPREKGRMRFHKLQNVQIALDYLRHRQVKLVNIRNDDIADGNPKLTLGLIWTIILHFQISDIQVSGQSEDMTAKEKLLLWSQRMVEGYQGLRCDNFTSSWRDGRLFNAIIHRHKPLLIDMNKVYRQTNLENLDQAFSVAERDLGVTRLLDPEDVDVPQPDEKSIITYVSSLYDAMPRVPDVQDGVRANELQLRWQEYRELVLLLLQWMRHHTAAFEERRFPSSFEEIEILWSQFLKFKEMELPAKEADKNRSKGIYQSLEGAVQAGQLKVPPGYHPLDVEKEWGKLHVAILEREKQLRSEFERLECLQRIVTKLQMEAGLCEEQLNQADALLQSDVRLLAAGKVPQRAGEVERDLDKADSMIRLLFNDVQTLKDGRHPQGEQMYRRVYRLHERLVAIRTEYNLRLKAGVAAPATQVAQVTLQSVQRRPELEDSTLRYLQDLLAWVEENQHRVDGAEWGVDLPSVEAQLGSHRGLHQSIEEFRAKIERARSDEGQLSPATRGAYRDCLGRLDLQYAKLLNSSKARLRSLESLHSFVAAATKELMWLNEKEEEEVGFDWSDRNTNMTAKKESYSALMRELELKEKKIKELQNAGDRLLREDHPARPTVESFQAALQTQWSWMLQLCCCIEAHLKENAAYFQFFSDVREAEGQLQKLQEALRRKYSCDRSATVTRLEDLLQDAQDEKEQLNEYKGHLSGLAKRAKAVVQLKPRHPAHPMRGRLPLLAVCDYKQVEVTVHKGDECQLVGPAQPSHWKVLSSSGSEAAVPSVCFLVPPPNQEAQEAVTRLEAQHQALVTLWHQLHVDMKSLLAWQSLRRDVQLIRSWSLATFRTLKPEEQRQALHSLELHYQAFLRDSQDAGGFGPEDRLMAEREYGSCSHHYQQLLQSLEQGAQEESRCQRCISELKDIRLQLEACETRTVHRLRLPLDKEPARECAQRIAEQQKAQAEVEGLGKGVARLSAEAEKVLALPEPSPAAPTLRSELELTLGKLEQVRSLSAIYLEKLKTISLVIRGTQGAEEVLRAHEEQLKEAQAVPATLPELEATKASLKKLRAQAEAQQPTFDALRDELRGAQEVGERLQQRHGERDVEVERWRERVAQLLERWQAVLAQTDVRQRELEQLGRQLRYYRESADPLGAWLQDARRRQEQIQAMPLADSQAVREQLRQEQALLEEIERHGEKVEECQRFAKQYINAIKDYELQLVTYKAQLEPVASPAKKPKVQSGSESVIQEYVDLRTHYSELTTLTSQYIKFISETLRRMEEEERLAEQQRAEERERLAEVEAALEKQRQLAEAHAQAKAQAEREAKELQQRMQEEVVRREEAAVDAQQQKRSIQEELQQLRQSSEAEIQAKARQAEAAERSRLRIEEEIRVVRLQLEATERQRGGAEGELQALRARAEEAEAQKRQAQEEAERLRRQVQDESQRKRQAEVELASRVKAEAEAAREKQRALQALEELRLQAEEAERRLRQAEVERARQVQVALETAQRSAEAELQSKRASFAEKTAQLERSLQEEHVAVAQLREEAERRAQQQAEAERAREEAERELERWQLKANEALRLRLQAEEVAQQKSLAQAEAEKQKEEAEREARRRGKAEEQAVRQRELAEQELEKQRQLAEGTAQQRLAAEQELIRLRAETEQGEQQRQLLEEELARLQREAAAATQKRQELEAELAKVRAEMEVLLASKARAEEESRSTSEKSKQRLEAEAGRFRELAEEAARLRALAEEAKRQRQLAEEDAARQRAEAERVLAEKLAAIGEATRLKTEAEIALKEKEAENERLRRLAEDEAFQRRRLEEQAAQHKADIEERLAQLRKASDSELERQKGLVEDTLRQRRQVEEEILALKASFEKAAAGKAELELELGRIRSNAEDTLRSKEQAELEAARQRQLAAEEERRRREAEERVQKSLAAEEEAARQRKAALEEVERLKAKVEEARRLRERAEQESARQLQLAQEAAQKRLQAEEKAHAFAVQQKEQELQQTLQQEQSVLDQLRGEAEAARRAAEEAEEARVQAEREAAQSRRQVEEAERLKQSAEEQAQARAQAQAAAEKLRKEAEQEAARRAQAEQAALRQKQAADAEMEKHKKFAEQTLRQKAQVEQELTTLRLQLEETDHQKNLLDEELQRLKAEATEAARQRSQVEEELFSVRVQMEELSKLKARIEAENRALILRDKDNTQRFLQEEAEKMKQVAEEAARLSVAAQEAARLRQLAEEDLAQQRALAEKMLKEKMQAVQEATRLKAEAELLQQQKELAQEQARRLQEDKEQMAQQLAEETQGFQRTLEAERQRQLEMSAEAERLKLRVAEMSRAQARAEEDAQRFRKQAEEIGEKLHRTELATQEKVTLVQTLEIQRQQSDHDAERLREAIAELEREKEKLQQEAKLLQLKSEEMQTVQQEQLLQETQALQQSFLSEKDSLLQRERFIEQEKAKLEQLFQDEVAKAQQLREEQQRQQQQMEQERQRLVASMEEARRRQHEAEEGVRRKQEELQQLEQQRRQQEELLAEENQRLREQLQLLEEQHRAALAHSEEVTASQVAATKTLPNGRDALDGPAAEAEPEHSFDGLRRKVSAQRLQEAGILSAEELQRLAQGHTTVDELARREDVRHYLQGRSSIAGLLLKATNEKLSVYAALQRQLLSPGTALILLEAQAASGFLLDPVRNRRLTVNEAVKEGVVGPELHHKLLSAERAVTGYKDPYTGQQISLFQAMQKGLIVREHGIRLLEAQIATGGVIDPVHSHRVPVDVAYRRGYFDEEMNRVLADPSDDTKGFFDPNTHENLTYLQLLERCVEDPETGLCLLPLTDKAAKGGELVYTDSEARDVFEKATVSAPFGKFQGKTVTIWEIINSEYFTAEQRRDLLRQFRTGRITVEKIIKIIITVVEEQEQKGRLCFEGLRSLVPAAELLESRVIDRELYQQLQRGERSVRDVAEVDTVRRALRGANVIAGVWLEEAGQKLSIYNALKKDLLPSDMAVALLEAQAGTGHIIDPATSARLTVDEAVRAGLVGPEFHEKLLSAEKAVTGYRDPYTGQSVSLFQALKKGLIPREQGLRLLDAQLSTGGIVDPSKSHRVPLDVACARGCLDEETSRALSAPRADAKAYSDPSTGEPATYGELQQRCRPDQLTGLSLLPLSEKAARARQEELYSELQARETFEKTPVEVPVGGFKGRTVTVWELISSEYFTAEQRQELLRQFRTGKVTVEKVIKILITIVEEVETLRQERLSFSGLRAPVPASELLASGVLSRAQFEQLKDGKTTVKDLSELGSVRTLLQGSGCLAGIYLEDTKEKVSIYEAMRRGLLRATTAALLLEAQAATGFLVDPVRNQRLYVHEAVKAGVVGPELHEQLLSAEKAVTGYRDPYSGSTISLFQAMQKGLVLRQHGIRLLEAQIATGGIIDPVHSHRVPVDVAYQRGYFSEEMNRVLADPSDDTKGFFDPNTHENLTYRQLLERCVEDPETGLRLLPLKGAEKAEVVETTQVYTEEETRRAFEETQIDIPGGGSHGGSTMSLWEVMQSDLIPEEQRAQLMADFQAGRVTKERMIIIIIEIIEKTEIIRQQGLASYDYVRRRLTAEDLFEARIISLETYNLLREGTRSLREALEAESAWCYLYGTGSVAGVYLPGSRQTLSIYQALKKGLLSAEVARLLLEAQAATGFLLDPVKGERLTVDEAVRKGLVGPELHDRLLSAERAVTGYRDPYTEQTISLFQAMKKELIPTEEALRLLDAQLATGGIVDPRLGFHLPLEVAYQRGYLNKDTHDQLSEPSEVRSYVDPSTDERLSYTQLLRRCRRDDGTGQLLLPLSDARKLTFRGLRKQITMEELVRSQVMDEATALQLREGLTSIEEVTKNLQKFLEGTSCIAGVFVDATKERLSVYQAMKKGIIRPGTAFELLEAQAATGYVIDPIKGLKLTVEEAVRMGIVGPEFKDKLLSAERAVTGYKDPYSGKLISLFQAMKKGLILKDHGIRLLEAQIATGGIIDPEESHRLPVEVAYKRGLFDEEMNEILTDPSDDTKGFFDPNTEENLTYLQLMERCITDPQTGLCLLPLKEKKRERKTSSKSSVRKRRVVIVDPETGKEMSVYEAYRKGLIDHQTYLELSEQECEWEEITISSSDGVVKSMIIDRRSGRQYDIDDAIAKNLIDRSALDQYRAGTLSITEFADMLSGNAGGFRSRSSSVGSSSSYPISPAVSRTQLASWSDPTEETGPVAGILDTETLEKVSITEAMHRNLVDNITGQRLLEAQACTGGIIDPSTGERFPVTDAVNKGLVDKIMVDRINLAQKAFCGFEDPRTKTKMSAAQALKKGWLYYEAGQRFLEVQYLTGGLIEPDTPGRVPLDEALQRGTVDARTAQKLRDVGAYSKYLTCPKTKLKISYKDALDRSMVEEGTGLRLLEAAAQSTKGYYSPYSVSGSGSTAGSRTGSRTGSRAGSRRGSFDATGSGFSMTFSSSSYSSSGYGRRYASGSSASLGGPESAVA

SEQ ID NO: 3088 - protein, 4525 aa, Homo sapiens
MDPSRAIQNEISSLKDERDRVQKKTFTKWVNKHLIKAQRHISDLYEDLRDGHNLISLLEVLSGDSLPREKGRMRFHKLQNVQIALDYLRHRQVKLVNIRNDDIADGNPKLTLGLIWTIILHFQISDIQVSGQSEDMTAKEKLLLWSQRMVEGYQGLRCDNFTSSWRDGRLFNAIIHRHKPLLIDMNKVYRQTNLENLDQAFSVAERDLGVTRLLDPEDVDVPQPDEKSIITYVSSLYDAMPRVPDVQDGVRANELQLRWQEYRELVLLLLQWMRHHTAAFEERRFPSSFEEIEILWSQFLKFKEMELPAKEADKNRSKGIYQSLEGAVQAGQLKVPPGYHPLDVEKEWGKLHVAILEREKQLRSEFERLECLQRIVTKLQMEAGLCEEQLNQADALLQSDVRLLAAGKVPQRAGEVERDLDKADSMIRLLFNDVQTLKDGRHPQGEQMYRRVYRLHERLVAIRTEYNLRLKAGVAAPATQVAQVTLQSVQRRPELEDSTLRYLQDLLAWVEENQHRVDGAEWGVDLPSVEAQLGSHRGLHQSIEEFRAKIERARSDEGQLSPATRGAYRDCLGRLDLQYAKLLNSSKARLRSLESLHSFVAAATKELMWLNEKEEEEVGFDWSDRNTNMTAKKESYSALMRELELKEKKIKELQNAGDRLLREDHPARPTVESFQAALQTQWSWMLQLCCCIEAHLKENAAYFQFFSDVREAEGQLQKLQEALRRKYSCDRSATVTRLEDLLQDAQDEKEQLNEYKGHLSGLAKRAKAVVQLKPRHPAHPMRGRLPLLAVCDYKQVEVTVHKGDECQLVGPAQPSHWKVLSSSGSEAAVPSVCFLVPPPNQEAQEAVTRLEAQHQALVTLWHQLHVDMKSLLAWQSLRRDVQLIRSWSLATFRTLKPEEQRQALHSLELHYQAFLRDSQDAGGFGPEDRLMAEREYGSCSHHYQQLLQSLEQGAQEESRCQRCISELKDIRLQLEACETRTVHRLRLPLDKEPARECAQRIAEQQKAQAEVEGLGKGVARLSAEAEKVLALPEPSPAAPTLRSELELTLGKLEQVRSLSAIYLEKLKTISLVIRGTQGAEEVLRAHEEQLKEAQAVPATLPELEATKASLKKLRAQAEAQQPTFDALRDELRGAQEVGERLQQRHGERDVEVERWRERVAQLLERWQAVLAQTDVRQRELEQLGRQLRYYRESADPLGAWLQDARRRQEQIQAMPLADSQAVREQLRQEQALLEEIERHGEKVEECQRFAKQYINAIKDYELQLVTYKAQLEPVASPAKKPKVQSGSESVIQEYVDLRTHYSELTTLTSQYIKFISETLRRMEEEERLAEQQRAEERERLAEVEAALEKQRQLAEAHAQAKAQAEREAKELQQRMQEEVVRREEAAVDAQQQKRSIQEELQQLRQSSEAEIQAKARQAEAAERSRLRIEEEIRVVRLQLEATERQRGGAEGELQALRARAEEAEAQKRQAQEEAERLRRQVQDESQRKRQAEVELASRVKAEAEAAREKQRALQALEELRLQAEEAERRLRQAEVERARQVQVALETAQRSAEAELQSKRASFAEKTAQLERSLQEEHVAVAQLREEAERRAQQQAEAERAREEAERELERWQLKANEALRLRLQAEEVAQQKSLAQAEAEKQKEEAEREARRRGKAEEQAVRQRELAEQELEKQRQLAEGTAQQRLAAEQELIRLRAETEQGEQQRQLLEEELARLQREAAAATQKRQELEAELAKVRAEMEVLLASKARAEEESRSTSEKSKQRLEAEAGRFRELAEEAARLRALAEEAKRQRQLAEEDAARQRAEAERVLAEKLAAIGEATRLKTEAEIALKEKEAENERLRRLAEDEAFQRRRLEEQAAQHKADIEERLAQLRKASDSELERQKGLVEDTLRQRRQVEEEILALKASFEKAAAGKAELELELGRIRSNAEDTLRSKEQAELEAARQRQLAAEEERRRREAEERVQKSLAAEEEAARQRKAALEEVERLKAKVEEARRLRERAEQESARQLQLAQEAAQKRLQAEEKAHAFAVQQKEQELQQTLQQEQSVLDQLRGEAEAARRAAEEAEEARVQAEREAAQSRRQVEEAERLKQSAEEQAQARAQAQAAAEKLRKEAEQEAARRAQAEQAALRQKQAADAEMEKHKKFAEQTLRQKAQVEQELTTLRLQLEETDHQKNLLDEELQRLKAEATEAARQRSQVEEELFSVRVQMEELSKLKARIEAENRALILRDKDNTQRFLQEEAEKMKQVAEEAARLSVAAQEAARLRQLAEEDLAQQRALAEKMLKEKMQAVQEATRLKAEAELLQQQKELAQEQARRLQEDKEQMAQQLAEETQGFQRTLEAERQRQLEMSAEAERLKLRVAEMSRAQARAEEDAQRFRKQAEEIGEKLHRTELATQEKVTLVQTLEIQRQQSDHDAERLREAIAELEREKEKLQQEAKLLQLKSEEMQTVQQEQLLQETQALQQSFLSEKDSLLQRERFIEQEKAKLEQLFQDEVAKAQQLREEQQRQQQQMEQERQRLVASMEEARRRQHEAEEGVRRKQEELQQLEQQRRQQEELLAEENQRLREQLQLLEEQHRAALAHSEEVTASQVAATKTLPNGRDALDGPAAEAEPEHSFDGLRRKVSAQRLQEAGILSAEELQRLAQGHTTVDELARREDVRHYLQGRSSIAGLLLKATNEKLSVYAALQRQLLSPGTALILLEAQAASGFLLDPVRNRRLTVNEAVKEGVVGPELHHKLLSAERAVTGYKDPYTGQQISLFQAMQKGLIVREHGIRLLEAQIATGGVIDPVHSHRVPVDVAYRRGYFDEEMNRVLADPSDDTKGFFDPNTHENLTYLQLLERCVEDPETGLCLLPLTDKAAKGGELVYTDSEARDVFEKATVSAPFGKFQGKTVTIWEIINSEYFTAEQRRDLLRQFRTGRITVEKIIKIIITVVEEQEQKGRLCFEGLRSLVPAAELLESRVIDRELYQQLQRGERSVRDVAEVDTVRRALRGANVIAGVWLEEAGQKLSIYNALKKDLLPSDMAVALLEAQAGTGHIIDPATSARLTVDEAVRAGLVGPEFHEKLLSAEKAVTGYRDPYTGQSVSLFQALKKGLIPREQGLRLLDAQLSTGGIVDPSKSHRVPLDVACARGCLDEETSRALSAPRADAKAYSDPSTGEPATYGELQQRCRPDQLTGLSLLPLSEKAARARQEELYSELQARETFEKTPVEVPVGGFKGRTVTVWELISSEYFTAEQRQELLRQFRTGKVTVEKVIKILITIVEEVETLRQERLSFSGLRAPVPASELLASGVLSRAQFEQLKDGKTTVKDLSELGSVRTLLQGSGCLAGIYLEDTKEKVSIYEAMRRGLLRATTAALLLEAQAATGFLVDPVRNQRLYVHEAVKAGVVGPELHEQLLSAEKAVTGYRDPYSGSTISLFQAMQKGLVLRQHGIRLLEAQIATGGIIDPVHSHRVPVDVAYQRGYFSEEMNRVLADPSDDTKGFFDPNTHENLTYRQLLERCVEDPETGLRLLPLKGAEKAEVVETTQVYTEEETRRAFEETQIDIPGGGSHGGSTMSLWEVMQSDLIPEEQRAQLMADFQAGRVTKERMIIIIIEIIEKTEIIRQQGLASYDYVRRRLTAEDLFEARIISLETYNLLREGTRSLREALEAESAWCYLYGTGSVAGVYLPGSRQTLSIYQALKKGLLSAEVARLLLEAQAATGFLLDPVKGERLTVDEAVRKGLVGPELHDRLLSAERAVTGYRDPYTEQTISLFQAMKKELIPTEEALRLLDAQLATGGIVDPRLGFHLPLEVAYQRGYLNKDTHDQLSEPSEVRSYVDPSTDERLSYTQLLRRCRRDDGTGQLLLPLSDARKLTFRGLRKQITMEELVRSQVMDEATALQLREGLTSIEEVTKNLQKFLEGTSCIAGVFVDATKERLSVYQAMKKGIIRPGTAFELLEAQAATGYVIDPIKGLKLTVEEAVRMGIVGPEFKDKLLSAERAVTGYKDPYSGKLISLFQAMKKGLILKDHGIRLLEAQIATGGIIDPEESHRLPVEVAYKRGLFDEEMNEILTDPSDDTKGFFDPNTEENLTYLQLMERCITDPQTGLCLLPLKEKKRERKTSSKSSVRKRRVVIVDPETGKEMSVYEAYRKGLIDHQTYLELSEQECEWEEITISSSDGVVKSMIIDRRSGRQYDIDDAIAKNLIDRSALDQYRAGTLSITEFADMLSGNAGGFRSRSSSVGSSSSYPISPAVSRTQLASWSDPTEETGPVAGILDTETLEKVSITEAMHRNLVDNITGQRLLEAQACTGGIIDPSTGERFPVTDAVNKGLVDKIMVDRINLAQKAFCGFEDPRTKTKMSAAQALKKGWLYYEAGQRFLEVQYLTGGLIEPDTPGRVPLDEALQRGTVDARTAQKLRDVGAYSKYLTCPKTKLKISYKDALDRSMVEEGTGLRLLEAAAQSTKGYYSPYSVSGSGSTAGSRTGSRTGSRAGSRRGSFDATGSGFSMTFSSSSYSSSGYGRRYASGSSASLGGPESAVA

SEQ ID NO: 3089 - protein, 4684 aa, Homo sapiens
MVAGMLMPRDQLRAIYEVLFREGVMVAKKDRRPRSLHPHVPGVTNLQVMRAMASLRARGLVRETFAWCHFYWYLTNEGIAHLRQYLHLPPEIVPASLQRVRRPVAMVMPARRTPHVQAVQGPLGSPPKRGPLPTEEQRVYRRKELEEVSPETPVVPATTQRTLARPGPEPAPATDERDRVQKKTFTKWVNKHLIKAQRHISDLYEDLRDGHNLISLLEVLSGDSLPREKGRMRFHKLQNVQIALDYLRHRQVKLVNIRNDDIADGNPKLTLGLIWTIILHFQISDIQVSGQSEDMTAKEKLLLWSQRMVEGYQGLRCDNFTSSWRDGRLFNAIIHRHKPLLIDMNKVYRQTNLENLDQAFSVAERDLGVTRLLDPEDVDVPQPDEKSIITYVSSLYDAMPRVPDVQDGVRANELQLRWQEYRELVLLLLQWMRHHTAAFEERRFPSSFEEIEILWSQFLKFKEMELPAKEADKNRSKGIYQSLEGAVQAGQLKVPPGYHPLDVEKEWGKLHVAILEREKQLRSEFERLECLQRIVTKLQMEAGLCEEQLNQADALLQSDVRLLAAGKVPQRAGEVERDLDKADSMIRLLFNDVQTLKDGRHPQGEQMYRRVYRLHERLVAIRTEYNLRLKAGVAAPATQVAQVTLQSVQRRPELEDSTLRYLQDLLAWVEENQHRVDGAEWGVDLPSVEAQLGSHRGLHQSIEEFRAKIERARSDEGQLSPATRGAYRDCLGRLDLQYAKLLNSSKARLRSLESLHSFVAAATKELMWLNEKEEEEVGFDWSDRNTNMTAKKESYSALMRELELKEKKIKELQNAGDRLLREDHPARPTVESFQAALQTQWSWMLQLCCCIEAHLKENAAYFQFFSDVREAEGQLQKLQEALRRKYSCDRSATVTRLEDLLQDAQDEKEQLNEYKGHLSGLAKRAKAVVQLKPRHPAHPMRGRLPLLAVCDYKQVEVTVHKGDECQLVGPAQPSHWKVLSSSGSEAAVPSVCFLVPPPNQEAQEAVTRLEAQHQALVTLWHQLHVDMKSLLAWQSLRRDVQLIRSWSLATFRTLKPEEQRQALHSLELHYQAFLRDSQDAGGFGPEDRLMAEREYGSCSHHYQQLLQSLEQGAQEESRCQRCISELKDIRLQLEACETRTVHRLRLPLDKEPARECAQRIAEQQKAQAEVEGLGKGVARLSAEAEKVLALPEPSPAAPTLRSELELTLGKLEQVRSLSAIYLEKLKTISLVIRGTQGAEEVLRAHEEQLKEAQAVPATLPELEATKASLKKLRAQAEAQQPTFDALRDELRGAQEVGERLQQRHGERDVEVERWRERVAQLLERWQAVLAQTDVRQRELEQLGRQLRYYRESADPLGAWLQDARRRQEQIQAMPLADSQAVREQLRQEQALLEEIERHGEKVEECQRFAKQYINAIKDYELQLVTYKAQLEPVASPAKKPKVQSGSESVIQEYVDLRTHYSELTTLTSQYIKFISETLRRMEEEERLAEQQRAEERERLAEVEAALEKQRQLAEAHAQAKAQAEREAKELQQRMQEEVVRREEAAVDAQQQKRSIQEELQQLRQSSEAEIQAKARQAEAAERSRLRIEEEIRVVRLQLEATERQRGGAEGELQALRARAEEAEAQKRQAQEEAERLRRQVQDESQRKRQAEVELASRVKAEAEAAREKQRALQALEELRLQAEEAERRLRQAEVERARQVQVALETAQRSAEAELQSKRASFAEKTAQLERSLQEEHVAVAQLREEAERRAQQQAEAERAREEAERELERWQLKANEALRLRLQAEEVAQQKSLAQAEAEKQKEEAEREARRRGKAEEQAVRQRELAEQELEKQRQLAEGTAQQRLAAEQELIRLRAETEQGEQQRQLLEEELARLQREAAAATQKRQELEAELAKVRAEMEVLLASKARAEEESRSTSEKSKQRLEAEAGRFRELAEEAARLRALAEEAKRQRQLAEEDAARQRAEAERVLAEKLAAIGEATRLKTEAEIALKEKEAENERLRRLAEDEAFQRRRLEEQAAQHKADIEERLAQLRKASDSELERQKGLVEDTLRQRRQVEEEILALKASFEKAAAGKAELELELGRIRSNAEDTLRSKEQAELEAARQRQLAAEEERRRREAEERVQKSLAAEEEAARQRKAALEEVERLKAKVEEARRLRERAEQESARQLQLAQEAAQKRLQAEEKAHAFAVQQKEQELQQTLQQEQSVLDQLRGEAEAARRAAEEAEEARVQAEREAAQSRRQVEEAERLKQSAEEQAQARAQAQAAAEKLRKEAEQEAARRAQAEQAALRQKQAADAEMEKHKKFAEQTLRQKAQVEQELTTLRLQLEETDHQKNLLDEELQRLKAEATEAARQRSQVEEELFSVRVQMEELSKLKARIEAENRALILRDKDNTQRFLQEEAEKMKQVAEEAARLSVAAQEAARLRQLAEEDLAQQRALAEKMLKEKMQAVQEATRLKAEAELLQQQKELAQEQARRLQEDKEQMAQQLAEETQGFQRTLEAERQRQLEMSAEAERLKLRVAEMSRAQARAEEDAQRFRKQAEEIGEKLHRTELATQEKVTLVQTLEIQRQQSDHDAERLREAIAELEREKEKLQQEAKLLQLKSEEMQTVQQEQLLQETQALQQSFLSEKDSLLQRERFIEQEKAKLEQLFQDEVAKAQQLREEQQRQQQQMEQERQRLVASMEEARRRQHEAEEGVRRKQEELQQLEQQRRQQEELLAEENQRLREQLQLLEEQHRAALAHSEEVTASQVAATKTLPNGRDALDGPAAEAEPEHSFDGLRRKVSAQRLQEAGILSAEELQRLAQGHTTVDELARREDVRHYLQGRSSIAGLLLKATNEKLSVYAALQRQLLSPGTALILLEAQAASGFLLDPVRNRRLTVNEAVKEGVVGPELHHKLLSAERAVTGYKDPYTGQQISLFQAMQKGLIVREHGIRLLEAQIATGGVIDPVHSHRVPVDVAYRRGYFDEEMNRVLADPSDDTKGFFDPNTHENLTYLQLLERCVEDPETGLCLLPLTDKAAKGGELVYTDSEARDVFEKATVSAPFGKFQGKTVTIWEIINSEYFTAEQRRDLLRQFRTGRITVEKIIKIIITVVEEQEQKGRLCFEGLRSLVPAAELLESRVIDRELYQQLQRGERSVRDVAEVDTVRRALRGANVIAGVWLEEAGQKLSIYNALKKDLLPSDMAVALLEAQAGTGHIIDPATSARLTVDEAVRAGLVGPEFHEKLLSAEKAVTGYRDPYTGQSVSLFQALKKGLIPREQGLRLLDAQLSTGGIVDPSKSHRVPLDVACARGCLDEETSRALSAPRADAKAYSDPSTGEPATYGELQQRCRPDQLTGLSLLPLSEKAARARQEELYSELQARETFEKTPVEVPVGGFKGRTVTVWELISSEYFTAEQRQELLRQFRTGKVTVEKVIKILITIVEEVETLRQERLSFSGLRAPVPASELLASGVLSRAQFEQLKDGKTTVKDLSELGSVRTLLQGSGCLAGIYLEDTKEKVSIYEAMRRGLLRATTAALLLEAQAATGFLVDPVRNQRLYVHEAVKAGVVGPELHEQLLSAEKAVTGYRDPYSGSTISLFQAMQKGLVLRQHGIRLLEAQIATGGIIDPVHSHRVPVDVAYQRGYFSEEMNRVLADPSDDTKGFFDPNTHENLTYRQLLERCVEDPETGLRLLPLKGAEKAEVVETTQVYTEEETRRAFEETQIDIPGGGSHGGSTMSLWEVMQSDLIPEEQRAQLMADFQAGRVTKERMIIIIIEIIEKTEIIRQQGLASYDYVRRRLTAEDLFEARIISLETYNLLREGTRSLREALEAESAWCYLYGTGSVAGVYLPGSRQTLSIYQALKKGLLSAEVARLLLEAQAATGFLLDPVKGERLTVDEAVRKGLVGPELHDRLLSAERAVTGYRDPYTEQTISLFQAMKKELIPTEEALRLLDAQLATGGIVDPRLGFHLPLEVAYQRGYLNKDTHDQLSEPSEVRSYVDPSTDERLSYTQLLRRCRRDDGTGQLLLPLSDARKLTFRGLRKQITMEELVRSQVMDEATALQLREGLTSIEEVTKNLQKFLEGTSCIAGVFVDATKERLSVYQAMKKGIIRPGTAFELLEAQAATGYVIDPIKGLKLTVEEAVRMGIVGPEFKDKLLSAERAVTGYKDPYSGKLISLFQAMKKGLILKDHGIRLLEAQIATGGIIDPEESHRLPVEVAYKRGLFDEEMNEILTDPSDDTKGFFDPNTEENLTYLQLMERCITDPQTGLCLLPLKEKKRERKTSSKSSVRKRRVVIVDPETGKEMSVYEAYRKGLIDHQTYLELSEQECEWEEITISSSDGVVKSMIIDRRSGRQYDIDDAIAKNLIDRSALDQYRAGTLSITEFADMLSGNAGGFRSRSSSVGSSSSYPISPAVSRTQLASWSDPTEETGPVAGILDTETLEKVSITEAMHRNLVDNITGQRLLEAQACTGGIIDPSTGERFPVTDAVNKGLVDKIMVDRINLAQKAFCGFEDPRTKTKMSAAQALKKGWLYYEAGQRFLEVQYLTGGLIEPDTPGRVPLDEALQRGTVDARTAQKLRDVGAYSKYLTCPKTKLKISYKDALDRSMVEEGTGLRLLEAAAQSTKGYYSPYSVSGSGSTAGSRTGSRTGSRAGSRRGSFDATGSGFSMTFSSSSYSSSGYGRRYASGSSASLGGPESAVA

SEQ ID NO: 3090 - protein, 4515 aa, Homo sapiens
MKIVPDERDRVQKKTFTKWVNKHLIKAQRHISDLYEDLRDGHNLISLLEVLSGDSLPREKGRMRFHKLQNVQIALDYLRHRQVKLVNIRNDDIADGNPKLTLGLIWTIILHFQISDIQVSGQSEDMTAKEKLLLWSQRMVEGYQGLRCDNFTSSWRDGRLFNAIIHRHKPLLIDMNKVYRQTNLENLDQAFSVAERDLGVTRLLDPEDVDVPQPDEKSIITYVSSLYDAMPRVPDVQDGVRANELQLRWQEYRELVLLLLQWMRHHTAAFEERRFPSSFEEIEILWSQFLKFKEMELPAKEADKNRSKGIYQSLEGAVQAGQLKVPPGYHPLDVEKEWGKLHVAILEREKQLRSEFERLECLQRIVTKLQMEAGLCEEQLNQADALLQSDVRLLAAGKVPQRAGEVERDLDKADSMIRLLFNDVQTLKDGRHPQGEQMYRRVYRLHERLVAIRTEYNLRLKAGVAAPATQVAQVTLQSVQRRPELEDSTLRYLQDLLAWVEENQHRVDGAEWGVDLPSVEAQLGSHRGLHQSIEEFRAKIERARSDEGQLSPATRGAYRDCLGRLDLQYAKLLNSSKARLRSLESLHSFVAAATKELMWLNEKEEEEVGFDWSDRNTNMTAKKESYSALMRELELKEKKIKELQNAGDRLLREDHPARPTVESFQAALQTQWSWMLQLCCCIEAHLKENAAYFQFFSDVREAEGQLQKLQEALRRKYSCDRSATVTRLEDLLQDAQDEKEQLNEYKGHLSGLAKRAKAVVQLKPRHPAHPMRGRLPLLAVCDYKQVEVTVHKGDECQLVGPAQPSHWKVLSSSGSEAAVPSVCFLVPPPNQEAQEAVTRLEAQHQALVTLWHQLHVDMKSLLAWQSLRRDVQLIRSWSLATFRTLKPEEQRQALHSLELHYQAFLRDSQDAGGFGPEDRLMAEREYGSCSHHYQQLLQSLEQGAQEESRCQRCISELKDIRLQLEACETRTVHRLRLPLDKEPARECAQRIAEQQKAQAEVEGLGKGVARLSAEAEKVLALPEPSPAAPTLRSELELTLGKLEQVRSLSAIYLEKLKTISLVIRGTQGAEEVLRAHEEQLKEAQAVPATLPELEATKASLKKLRAQAEAQQPTFDALRDELRGAQEVGERLQQRHGERDVEVERWRERVAQLLERWQAVLAQTDVRQRELEQLGRQLRYYRESADPLGAWLQDARRRQEQIQAMPLADSQAVREQLRQEQALLEEIERHGEKVEECQRFAKQYINAIKDYELQLVTYKAQLEPVASPAKKPKVQSGSESVIQEYVDLRTHYSELTTLTSQYIKFISETLRRMEEEERLAEQQRAEERERLAEVEAALEKQRQLAEAHAQAKAQAEREAKELQQRMQEEVVRREEAAVDAQQQKRSIQEELQQLRQSSEAEIQAKARQAEAAERSRLRIEEEIRVVRLQLEATERQRGGAEGELQALRARAEEAEAQKRQAQEEAERLRRQVQDESQRKRQAEVELASRVKAEAEAAREKQRALQALEELRLQAEEAERRLRQAEVERARQVQVALETAQRSAEAELQSKRASFAEKTAQLERSLQEEHVAVAQLREEAERRAQQQAEAERAREEAERELERWQLKANEALRLRLQAEEVAQQKSLAQAEAEKQKEEAEREARRRGKAEEQAVRQRELAEQELEKQRQLAEGTAQQRLAAEQELIRLRAETEQGEQQRQLLEEELARLQREAAAATQKRQELEAELAKVRAEMEVLLASKARAEEESRSTSEKSKQRLEAEAGRFRELAEEAARLRALAEEAKRQRQLAEEDAARQRAEAERVLAEKLAAIGEATRLKTEAEIALKEKEAENERLRRLAEDEAFQRRRLEEQAAQHKADIEERLAQLRKASDSELERQKGLVEDTLRQRRQVEEEILALKASFEKAAAGKAELELELGRIRSNAEDTLRSKEQAELEAARQRQLAAEEERRRREAEERVQKSLAAEEEAARQRKAALEEVERLKAKVEEARRLRERAEQESARQLQLAQEAAQKRLQAEEKAHAFAVQQKEQELQQTLQQEQSVLDQLRGEAEAARRAAEEAEEARVQAEREAAQSRRQVEEAERLKQSAEEQAQARAQAQAAAEKLRKEAEQEAARRAQAEQAALRQKQAADAEMEKHKKFAEQTLRQKAQVEQELTTLRLQLEETDHQKNLLDEELQRLKAEATEAARQRSQVEEELFSVRVQMEELSKLKARIEAENRALILRDKDNTQRFLQEEAEKMKQVAEEAARLSVAAQEAARLRQLAEEDLAQQRALAEKMLKEKMQAVQEATRLKAEAELLQQQKELAQEQARRLQEDKEQMAQQLAEETQGFQRTLEAERQRQLEMSAEAERLKLRVAEMSRAQARAEEDAQRFRKQAEEIGEKLHRTELATQEKVTLVQTLEIQRQQSDHDAERLREAIAELEREKEKLQQEAKLLQLKSEEMQTVQQEQLLQETQALQQSFLSEKDSLLQRERFIEQEKAKLEQLFQDEVAKAQQLREEQQRQQQQMEQERQRLVASMEEARRRQHEAEEGVRRKQEELQQLEQQRRQQEELLAEENQRLREQLQLLEEQHRAALAHSEEVTASQVAATKTLPNGRDALDGPAAEAEPEHSFDGLRRKVSAQRLQEAGILSAEELQRLAQGHTTVDELARREDVRHYLQGRSSIAGLLLKATNEKLSVYAALQRQLLSPGTALILLEAQAASGFLLDPVRNRRLTVNEAVKEGVVGPELHHKLLSAERAVTGYKDPYTGQQISLFQAMQKGLIVREHGIRLLEAQIATGGVIDPVHSHRVPVDVAYRRGYFDEEMNRVLADPSDDTKGFFDPNTHENLTYLQLLERCVEDPETGLCLLPLTDKAAKGGELVYTDSEARDVFEKATVSAPFGKFQGKTVTIWEIINSEYFTAEQRRDLLRQFRTGRITVEKIIKIIITVVEEQEQKGRLCFEGLRSLVPAAELLESRVIDRELYQQLQRGERSVRDVAEVDTVRRALRGANVIAGVWLEEAGQKLSIYNALKKDLLPSDMAVALLEAQAGTGHIIDPATSARLTVDEAVRAGLVGPEFHEKLLSAEKAVTGYRDPYTGQSVSLFQALKKGLIPREQGLRLLDAQLSTGGIVDPSKSHRVPLDVACARGCLDEETSRALSAPRADAKAYSDPSTGEPATYGELQQRCRPDQLTGLSLLPLSEKAARARQEELYSELQARETFEKTPVEVPVGGFKGRTVTVWELISSEYFTAEQRQELLRQFRTGKVTVEKVIKILITIVEEVETLRQERLSFSGLRAPVPASELLASGVLSRAQFEQLKDGKTTVKDLSELGSVRTLLQGSGCLAGIYLEDTKEKVSIYEAMRRGLLRATTAALLLEAQAATGFLVDPVRNQRLYVHEAVKAGVVGPELHEQLLSAEKAVTGYRDPYSGSTISLFQAMQKGLVLRQHGIRLLEAQIATGGIIDPVHSHRVPVDVAYQRGYFSEEMNRVLADPSDDTKGFFDPNTHENLTYRQLLERCVEDPETGLRLLPLKGAEKAEVVETTQVYTEEETRRAFEETQIDIPGGGSHGGSTMSLWEVMQSDLIPEEQRAQLMADFQAGRVTKERMIIIIIEIIEKTEIIRQQGLASYDYVRRRLTAEDLFEARIISLETYNLLREGTRSLREALEAESAWCYLYGTGSVAGVYLPGSRQTLSIYQALKKGLLSAEVARLLLEAQAATGFLLDPVKGERLTVDEAVRKGLVGPELHDRLLSAERAVTGYRDPYTEQTISLFQAMKKELIPTEEALRLLDAQLATGGIVDPRLGFHLPLEVAYQRGYLNKDTHDQLSEPSEVRSYVDPSTDERLSYTQLLRRCRRDDGTGQLLLPLSDARKLTFRGLRKQITMEELVRSQVMDEATALQLREGLTSIEEVTKNLQKFLEGTSCIAGVFVDATKERLSVYQAMKKGIIRPGTAFELLEAQAATGYVIDPIKGLKLTVEEAVRMGIVGPEFKDKLLSAERAVTGYKDPYSGKLISLFQAMKKGLILKDHGIRLLEAQIATGGIIDPEESHRLPVEVAYKRGLFDEEMNEILTDPSDDTKGFFDPNTEENLTYLQLMERCITDPQTGLCLLPLKEKKRERKTSSKSSVRKRRVVIVDPETGKEMSVYEAYRKGLIDHQTYLELSEQECEWEEITISSSDGVVKSMIIDRRSGRQYDIDDAIAKNLIDRSALDQYRAGTLSITEFADMLSGNAGGFRSRSSSVGSSSSYPISPAVSRTQLASWSDPTEETGPVAGILDTETLEKVSITEAMHRNLVDNITGQRLLEAQACTGGIIDPSTGERFPVTDAVNKGLVDKIMVDRINLAQKAFCGFEDPRTKTKMSAAQALKKGWLYYEAGQRFLEVQYLTGGLIEPDTPGRVPLDEALQRGTVDARTAQKLRDVGAYSKYLTCPKTKLKISYKDALDRSMVEEGTGLRLLEAAAQSTKGYYSPYSVSGSGSTAGSRTGSRTGSRAGSRRGSFDATGSGFSMTFSSSSYSSSGYGRRYASGSSASLGGPESAVA

SEQ ID NO: 3091 - protein, 4547 aa, Homo sapiens
MEPSGSLFPSLVVVGHVVTLAAVWHWRRGRRWAQDEQDERDRVQKKTFTKWVNKHLIKAQRHISDLYEDLRDGHNLISLLEVLSGDSLPREKGRMRFHKLQNVQIALDYLRHRQVKLVNIRNDDIADGNPKLTLGLIWTIILHFQISDIQVSGQSEDMTAKEKLLLWSQRMVEGYQGLRCDNFTSSWRDGRLFNAIIHRHKPLLIDMNKVYRQTNLENLDQAFSVAERDLGVTRLLDPEDVDVPQPDEKSIITYVSSLYDAMPRVPDVQDGVRANELQLRWQEYRELVLLLLQWMRHHTAAFEERRFPSSFEEIEILWSQFLKFKEMELPAKEADKNRSKGIYQSLEGAVQAGQLKVPPGYHPLDVEKEWGKLHVAILEREKQLRSEFERLECLQRIVTKLQMEAGLCEEQLNQADALLQSDVRLLAAGKVPQRAGEVERDLDKADSMIRLLFNDVQTLKDGRHPQGEQMYRRVYRLHERLVAIRTEYNLRLKAGVAAPATQVAQVTLQSVQRRPELEDSTLRYLQDLLAWVEENQHRVDGAEWGVDLPSVEAQLGSHRGLHQSIEEFRAKIERARSDEGQLSPATRGAYRDCLGRLDLQYAKLLNSSKARLRSLESLHSFVAAATKELMWLNEKEEEEVGFDWSDRNTNMTAKKESYSALMRELELKEKKIKELQNAGDRLLREDHPARPTVESFQAALQTQWSWMLQLCCCIEAHLKENAAYFQFFSDVREAEGQLQKLQEALRRKYSCDRSATVTRLEDLLQDAQDEKEQLNEYKGHLSGLAKRAKAVVQLKPRHPAHPMRGRLPLLAVCDYKQVEVTVHKGDECQLVGPAQPSHWKVLSSSGSEAAVPSVCFLVPPPNQEAQEAVTRLEAQHQALVTLWHQLHVDMKSLLAWQSLRRDVQLIRSWSLATFRTLKPEEQRQALHSLELHYQAFLRDSQDAGGFGPEDRLMAEREYGSCSHHYQQLLQSLEQGAQEESRCQRCISELKDIRLQLEACETRTVHRLRLPLDKEPARECAQRIAEQQKAQAEVEGLGKGVARLSAEAEKVLALPEPSPAAPTLRSELELTLGKLEQVRSLSAIYLEKLKTISLVIRGTQGAEEVLRAHEEQLKEAQAVPATLPELEATKASLKKLRAQAEAQQPTFDALRDELRGAQEVGERLQQRHGERDVEVERWRERVAQLLERWQAVLAQTDVRQRELEQLGRQLRYYRESADPLGAWLQDARRRQEQIQAMPLADSQAVREQLRQEQALLEEIERHGEKVEECQRFAKQYINAIKDYELQLVTYKAQLEPVASPAKKPKVQSGSESVIQEYVDLRTHYSELTTLTSQYIKFISETLRRMEEEERLAEQQRAEERERLAEVEAALEKQRQLAEAHAQAKAQAEREAKELQQRMQEEVVRREEAAVDAQQQKRSIQEELQQLRQSSEAEIQAKARQAEAAERSRLRIEEEIRVVRLQLEATERQRGGAEGELQALRARAEEAEAQKRQAQEEAERLRRQVQDESQRKRQAEVELASRVKAEAEAAREKQRALQALEELRLQAEEAERRLRQAEVERARQVQVALETAQRSAEAELQSKRASFAEKTAQLERSLQEEHVAVAQLREEAERRAQQQAEAERAREEAERELERWQLKANEALRLRLQAEEVAQQKSLAQAEAEKQKEEAEREARRRGKAEEQAVRQRELAEQELEKQRQLAEGTAQQRLAAEQELIRLRAETEQGEQQRQLLEEELARLQREAAAATQKRQELEAELAKVRAEMEVLLASKARAEEESRSTSEKSKQRLEAEAGRFRELAEEAARLRALAEEAKRQRQLAEEDAARQRAEAERVLAEKLAAIGEATRLKTEAEIALKEKEAENERLRRLAEDEAFQRRRLEEQAAQHKADIEERLAQLRKASDSELERQKGLVEDTLRQRRQVEEEILALKASFEKAAAGKAELELELGRIRSNAEDTLRSKEQAELEAARQRQLAAEEERRRREAEERVQKSLAAEEEAARQRKAALEEVERLKAKVEEARRLRERAEQESARQLQLAQEAAQKRLQAEEKAHAFAVQQKEQELQQTLQQEQSVLDQLRGEAEAARRAAEEAEEARVQAEREAAQSRRQVEEAERLKQSAEEQAQARAQAQAAAEKLRKEAEQEAARRAQAEQAALRQKQAADAEMEKHKKFAEQTLRQKAQVEQELTTLRLQLEETDHQKNLLDEELQRLKAEATEAARQRSQVEEELFSVRVQMEELSKLKARIEAENRALILRDKDNTQRFLQEEAEKMKQVAEEAARLSVAAQEAARLRQLAEEDLAQQRALAEKMLKEKMQAVQEATRLKAEAELLQQQKELAQEQARRLQEDKEQMAQQLAEETQGFQRTLEAERQRQLEMSAEAERLKLRVAEMSRAQARAEEDAQRFRKQAEEIGEKLHRTELATQEKVTLVQTLEIQRQQSDHDAERLREAIAELEREKEKLQQEAKLLQLKSEEMQTVQQEQLLQETQALQQSFLSEKDSLLQRERFIEQEKAKLEQLFQDEVAKAQQLREEQQRQQQQMEQERQRLVASMEEARRRQHEAEEGVRRKQEELQQLEQQRRQQEELLAEENQRLREQLQLLEEQHRAALAHSEEVTASQVAATKTLPNGRDALDGPAAEAEPEHSFDGLRRKVSAQRLQEAGILSAEELQRLAQGHTTVDELARREDVRHYLQGRSSIAGLLLKATNEKLSVYAALQRQLLSPGTALILLEAQAASGFLLDPVRNRRLTVNEAVKEGVVGPELHHKLLSAERAVTGYKDPYTGQQISLFQAMQKGLIVREHGIRLLEAQIATGGVIDPVHSHRVPVDVAYRRGYFDEEMNRVLADPSDDTKGFFDPNTHENLTYLQLLERCVEDPETGLCLLPLTDKAAKGGELVYTDSEARDVFEKATVSAPFGKFQGKTVTIWEIINSEYFTAEQRRDLLRQFRTGRITVEKIIKIIITVVEEQEQKGRLCFEGLRSLVPAAELLESRVIDRELYQQLQRGERSVRDVAEVDTVRRALRGANVIAGVWLEEAGQKLSIYNALKKDLLPSDMAVALLEAQAGTGHIIDPATSARLTVDEAVRAGLVGPEFHEKLLSAEKAVTGYRDPYTGQSVSLFQALKKGLIPREQGLRLLDAQLSTGGIVDPSKSHRVPLDVACARGCLDEETSRALSAPRADAKAYSDPSTGEPATYGELQQRCRPDQLTGLSLLPLSEKAARARQEELYSELQARETFEKTPVEVPVGGFKGRTVTVWELISSEYFTAEQRQELLRQFRTGKVTVEKVIKILITIVEEVETLRQERLSFSGLRAPVPASELLASGVLSRAQFEQLKDGKTTVKDLSELGSVRTLLQGSGCLAGIYLEDTKEKVSIYEAMRRGLLRATTAALLLEAQAATGFLVDPVRNQRLYVHEAVKAGVVGPELHEQLLSAEKAVTGYRDPYSGSTISLFQAMQKGLVLRQHGIRLLEAQIATGGIIDPVHSHRVPVDVAYQRGYFSEEMNRVLADPSDDTKGFFDPNTHENLTYRQLLERCVEDPETGLRLLPLKGAEKAEVVETTQVYTEEETRRAFEETQIDIPGGGSHGGSTMSLWEVMQSDLIPEEQRAQLMADFQAGRVTKERMIIIIIEIIEKTEIIRQQGLASYDYVRRRLTAEDLFEARIISLETYNLLREGTRSLREALEAESAWCYLYGTGSVAGVYLPGSRQTLSIYQALKKGLLSAEVARLLLEAQAATGFLLDPVKGERLTVDEAVRKGLVGPELHDRLLSAERAVTGYRDPYTEQTISLFQAMKKELIPTEEALRLLDAQLATGGIVDPRLGFHLPLEVAYQRGYLNKDTHDQLSEPSEVRSYVDPSTDERLSYTQLLRRCRRDDGTGQLLLPLSDARKLTFRGLRKQITMEELVRSQVMDEATALQLREGLTSIEEVTKNLQKFLEGTSCIAGVFVDATKERLSVYQAMKKGIIRPGTAFELLEAQAATGYVIDPIKGLKLTVEEAVRMGIVGPEFKDKLLSAERAVTGYKDPYSGKLISLFQAMKKGLILKDHGIRLLEAQIATGGIIDPEESHRLPVEVAYKRGLFDEEMNEILTDPSDDTKGFFDPNTEENLTYLQLMERCITDPQTGLCLLPLKEKKRERKTSSKSSVRKRRVVIVDPETGKEMSVYEAYRKGLIDHQTYLELSEQECEWEEITISSSDGVVKSMIIDRRSGRQYDIDDAIAKNLIDRSALDQYRAGTLSITEFADMLSGNAGGFRSRSSSVGSSSSYPISPAVSRTQLASWSDPTEETGPVAGILDTETLEKVSITEAMHRNLVDNITGQRLLEAQACTGGIIDPSTGERFPVTDAVNKGLVDKIMVDRINLAQKAFCGFEDPRTKTKMSAAQALKKGWLYYEAGQRFLEVQYLTGGLIEPDTPGRVPLDEALQRGTVDARTAQKLRDVGAYSKYLTCPKTKLKISYKDALDRSMVEEGTGLRLLEAAAQSTKGYYSPYSVSGSGSTAGSRTGSRTGSRAGSRRGSFDATGSGFSMTFSSSSYSSSGYGRRYASGSSASLGGPESAVA

SEQ ID NO: 3092 - protein, 4551 aa, Homo sapiens
MSGAGGAFASPREVLLERPCWLDGGCEPARRGYLYQQLCCVDERDRVQKKTFTKWVNKHLIKAQRHISDLYEDLRDGHNLISLLEVLSGDSLPREKGRMRFHKLQNVQIALDYLRHRQVKLVNIRNDDIADGNPKLTLGLIWTIILHFQISDIQVSGQSEDMTAKEKLLLWSQRMVEGYQGLRCDNFTSSWRDGRLFNAIIHRHKPLLIDMNKVYRQTNLENLDQAFSVAERDLGVTRLLDPEDVDVPQPDEKSIITYVSSLYDAMPRVPDVQDGVRANELQLRWQEYRELVLLLLQWMRHHTAAFEERRFPSSFEEIEILWSQFLKFKEMELPAKEADKNRSKGIYQSLEGAVQAGQLKVPPGYHPLDVEKEWGKLHVAILEREKQLRSEFERLECLQRIVTKLQMEAGLCEEQLNQADALLQSDVRLLAAGKVPQRAGEVERDLDKADSMIRLLFNDVQTLKDGRHPQGEQMYRRVYRLHERLVAIRTEYNLRLKAGVAAPATQVAQVTLQSVQRRPELEDSTLRYLQDLLAWVEENQHRVDGAEWGVDLPSVEAQLGSHRGLHQSIEEFRAKIERARSDEGQLSPATRGAYRDCLGRLDLQYAKLLNSSKARLRSLESLHSFVAAATKELMWLNEKEEEEVGFDWSDRNTNMTAKKESYSALMRELELKEKKIKELQNAGDRLLREDHPARPTVESFQAALQTQWSWMLQLCCCIEAHLKENAAYFQFFSDVREAEGQLQKLQEALRRKYSCDRSATVTRLEDLLQDAQDEKEQLNEYKGHLSGLAKRAKAVVQLKPRHPAHPMRGRLPLLAVCDYKQVEVTVHKGDECQLVGPAQPSHWKVLSSSGSEAAVPSVCFLVPPPNQEAQEAVTRLEAQHQALVTLWHQLHVDMKSLLAWQSLRRDVQLIRSWSLATFRTLKPEEQRQALHSLELHYQAFLRDSQDAGGFGPEDRLMAEREYGSCSHHYQQLLQSLEQGAQEESRCQRCISELKDIRLQLEACETRTVHRLRLPLDKEPARECAQRIAEQQKAQAEVEGLGKGVARLSAEAEKVLALPEPSPAAPTLRSELELTLGKLEQVRSLSAIYLEKLKTISLVIRGTQGAEEVLRAHEEQLKEAQAVPATLPELEATKASLKKLRAQAEAQQPTFDALRDELRGAQEVGERLQQRHGERDVEVERWRERVAQLLERWQAVLAQTDVRQRELEQLGRQLRYYRESADPLGAWLQDARRRQEQIQAMPLADSQAVREQLRQEQALLEEIERHGEKVEECQRFAKQYINAIKDYELQLVTYKAQLEPVASPAKKPKVQSGSESVIQEYVDLRTHYSELTTLTSQYIKFISETLRRMEEEERLAEQQRAEERERLAEVEAALEKQRQLAEAHAQAKAQAEREAKELQQRMQEEVVRREEAAVDAQQQKRSIQEELQQLRQSSEAEIQAKARQAEAAERSRLRIEEEIRVVRLQLEATERQRGGAEGELQALRARAEEAEAQKRQAQEEAERLRRQVQDESQRKRQAEVELASRVKAEAEAAREKQRALQALEELRLQAEEAERRLRQAEVERARQVQVALETAQRSAEAELQSKRASFAEKTAQLERSLQEEHVAVAQLREEAERRAQQQAEAERAREEAERELERWQLKANEALRLRLQAEEVAQQKSLAQAEAEKQKEEAEREARRRGKAEEQAVRQRELAEQELEKQRQLAEGTAQQRLAAEQELIRLRAETEQGEQQRQLLEEELARLQREAAAATQKRQELEAELAKVRAEMEVLLASKARAEEESRSTSEKSKQRLEAEAGRFRELAEEAARLRALAEEAKRQRQLAEEDAARQRAEAERVLAEKLAAIGEATRLKTEAEIALKEKEAENERLRRLAEDEAFQRRRLEEQAAQHKADIEERLAQLRKASDSELERQKGLVEDTLRQRRQVEEEILALKASFEKAAAGKAELELELGRIRSNAEDTLRSKEQAELEAARQRQLAAEEERRRREAEERVQKSLAAEEEAARQRKAALEEVERLKAKVEEARRLRERAEQESARQLQLAQEAAQKRLQAEEKAHAFAVQQKEQELQQTLQQEQSVLDQLRGEAEAARRAAEEAEEARVQAEREAAQSRRQVEEAERLKQSAEEQAQARAQAQAAAEKLRKEAEQEAARRAQAEQAALRQKQAADAEMEKHKKFAEQTLRQKAQVEQELTTLRLQLEETDHQKNLLDEELQRLKAEATEAARQRSQVEEELFSVRVQMEELSKLKARIEAENRALILRDKDNTQRFLQEEAEKMKQVAEEAARLSVAAQEAARLRQLAEEDLAQQRALAEKMLKEKMQAVQEATRLKAEAELLQQQKELAQEQARRLQEDKEQMAQQLAEETQGFQRTLEAERQRQLEMSAEAERLKLRVAEMSRAQARAEEDAQRFRKQAEEIGEKLHRTELATQEKVTLVQTLEIQRQQSDHDAERLREAIAELEREKEKLQQEAKLLQLKSEEMQTVQQEQLLQETQALQQSFLSEKDSLLQRERFIEQEKAKLEQLFQDEVAKAQQLREEQQRQQQQMEQERQRLVASMEEARRRQHEAEEGVRRKQEELQQLEQQRRQQEELLAEENQRLREQLQLLEEQHRAALAHSEEVTASQVAATKTLPNGRDALDGPAAEAEPEHSFDGLRRKVSAQRLQEAGILSAEELQRLAQGHTTVDELARREDVRHYLQGRSSIAGLLLKATNEKLSVYAALQRQLLSPGTALILLEAQAASGFLLDPVRNRRLTVNEAVKEGVVGPELHHKLLSAERAVTGYKDPYTGQQISLFQAMQKGLIVREHGIRLLEAQIATGGVIDPVHSHRVPVDVAYRRGYFDEEMNRVLADPSDDTKGFFDPNTHENLTYLQLLERCVEDPETGLCLLPLTDKAAKGGELVYTDSEARDVFEKATVSAPFGKFQGKTVTIWEIINSEYFTAEQRRDLLRQFRTGRITVEKIIKIIITVVEEQEQKGRLCFEGLRSLVPAAELLESRVIDRELYQQLQRGERSVRDVAEVDTVRRALRGANVIAGVWLEEAGQKLSIYNALKKDLLPSDMAVALLEAQAGTGHIIDPATSARLTVDEAVRAGLVGPEFHEKLLSAEKAVTGYRDPYTGQSVSLFQALKKGLIPREQGLRLLDAQLSTGGIVDPSKSHRVPLDVACARGCLDEETSRALSAPRADAKAYSDPSTGEPATYGELQQRCRPDQLTGLSLLPLSEKAARARQEELYSELQARETFEKTPVEVPVGGFKGRTVTVWELISSEYFTAEQRQELLRQFRTGKVTVEKVIKILITIVEEVETLRQERLSFSGLRAPVPASELLASGVLSRAQFEQLKDGKTTVKDLSELGSVRTLLQGSGCLAGIYLEDTKEKVSIYEAMRRGLLRATTAALLLEAQAATGFLVDPVRNQRLYVHEAVKAGVVGPELHEQLLSAEKAVTGYRDPYSGSTISLFQAMQKGLVLRQHGIRLLEAQIATGGIIDPVHSHRVPVDVAYQRGYFSEEMNRVLADPSDDTKGFFDPNTHENLTYRQLLERCVEDPETGLRLLPLKGAEKAEVVETTQVYTEEETRRAFEETQIDIPGGGSHGGSTMSLWEVMQSDLIPEEQRAQLMADFQAGRVTKERMIIIIIEIIEKTEIIRQQGLASYDYVRRRLTAEDLFEARIISLETYNLLREGTRSLREALEAESAWCYLYGTGSVAGVYLPGSRQTLSIYQALKKGLLSAEVARLLLEAQAATGFLLDPVKGERLTVDEAVRKGLVGPELHDRLLSAERAVTGYRDPYTEQTISLFQAMKKELIPTEEALRLLDAQLATGGIVDPRLGFHLPLEVAYQRGYLNKDTHDQLSEPSEVRSYVDPSTDERLSYTQLLRRCRRDDGTGQLLLPLSDARKLTFRGLRKQITMEELVRSQVMDEATALQLREGLTSIEEVTKNLQKFLEGTSCIAGVFVDATKERLSVYQAMKKGIIRPGTAFELLEAQAATGYVIDPIKGLKLTVEEAVRMGIVGPEFKDKLLSAERAVTGYKDPYSGKLISLFQAMKKGLILKDHGIRLLEAQIATGGIIDPEESHRLPVEVAYKRGLFDEEMNEILTDPSDDTKGFFDPNTEENLTYLQLMERCITDPQTGLCLLPLKEKKRERKTSSKSSVRKRRVVIVDPETGKEMSVYEAYRKGLIDHQTYLELSEQECEWEEITISSSDGVVKSMIIDRRSGRQYDIDDAIAKNLIDRSALDQYRAGTLSITEFADMLSGNAGGFRSRSSSVGSSSSYPISPAVSRTQLASWSDPTEETGPVAGILDTETLEKVSITEAMHRNLVDNITGQRLLEAQACTGGIIDPSTGERFPVTDAVNKGLVDKIMVDRINLAQKAFCGFEDPRTKTKMSAAQALKKGWLYYEAGQRFLEVQYLTGGLIEPDTPGRVPLDEALQRGTVDARTAQKLRDVGAYSKYLTCPKTKLKISYKDALDRSMVEEGTGLRLLEAAAQSTKGYYSPYSVSGSGSTAGSRTGSRTGSRAGSRRGSFDATGSGFSMTFSSSSYSSSGYGRRYASGSSASLGGPESAVA

SEQ ID NO: 3093 - protein, 4547 aa, Homo sapiens
MSQHQLRVPQPEGLGRKRTSSEDNLYLAVLRASEGKKDERDRVQKKTFTKWVNKHLIKAQRHISDLYEDLRDGHNLISLLEVLSGDSLPREKGRMRFHKLQNVQIALDYLRHRQVKLVNIRNDDIADGNPKLTLGLIWTIILHFQISDIQVSGQSEDMTAKEKLLLWSQRMVEGYQGLRCDNFTSSWRDGRLFNAIIHRHKPLLIDMNKVYRQTNLENLDQAFSVAERDLGVTRLLDPEDVDVPQPDEKSIITYVSSLYDAMPRVPDVQDGVRANELQLRWQEYRELVLLLLQWMRHHTAAFEERRFPSSFEEIEILWSQFLKFKEMELPAKEADKNRSKGIYQSLEGAVQAGQLKVPPGYHPLDVEKEWGKLHVAILEREKQLRSEFERLECLQRIVTKLQMEAGLCEEQLNQADALLQSDVRLLAAGKVPQRAGEVERDLDKADSMIRLLFNDVQTLKDGRHPQGEQMYRRVYRLHERLVAIRTEYNLRLKAGVAAPATQVAQVTLQSVQRRPELEDSTLRYLQDLLAWVEENQHRVDGAEWGVDLPSVEAQLGSHRGLHQSIEEFRAKIERARSDEGQLSPATRGAYRDCLGRLDLQYAKLLNSSKARLRSLESLHSFVAAATKELMWLNEKEEEEVGFDWSDRNTNMTAKKESYSALMRELELKEKKIKELQNAGDRLLREDHPARPTVESFQAALQTQWSWMLQLCCCIEAHLKENAAYFQFFSDVREAEGQLQKLQEALRRKYSCDRSATVTRLEDLLQDAQDEKEQLNEYKGHLSGLAKRAKAVVQLKPRHPAHPMRGRLPLLAVCDYKQVEVTVHKGDECQLVGPAQPSHWKVLSSSGSEAAVPSVCFLVPPPNQEAQEAVTRLEAQHQALVTLWHQLHVDMKSLLAWQSLRRDVQLIRSWSLATFRTLKPEEQRQALHSLELHYQAFLRDSQDAGGFGPEDRLMAEREYGSCSHHYQQLLQSLEQGAQEESRCQRCISELKDIRLQLEACETRTVHRLRLPLDKEPARECAQRIAEQQKAQAEVEGLGKGVARLSAEAEKVLALPEPSPAAPTLRSELELTLGKLEQVRSLSAIYLEKLKTISLVIRGTQGAEEVLRAHEEQLKEAQAVPATLPELEATKASLKKLRAQAEAQQPTFDALRDELRGAQEVGERLQQRHGERDVEVERWRERVAQLLERWQAVLAQTDVRQRELEQLGRQLRYYRESADPLGAWLQDARRRQEQIQAMPLADSQAVREQLRQEQALLEEIERHGEKVEECQRFAKQYINAIKDYELQLVTYKAQLEPVASPAKKPKVQSGSESVIQEYVDLRTHYSELTTLTSQYIKFISETLRRMEEEERLAEQQRAEERERLAEVEAALEKQRQLAEAHAQAKAQAEREAKELQQRMQEEVVRREEAAVDAQQQKRSIQEELQQLRQSSEAEIQAKARQAEAAERSRLRIEEEIRVVRLQLEATERQRGGAEGELQALRARAEEAEAQKRQAQEEAERLRRQVQDESQRKRQAEVELASRVKAEAEAAREKQRALQALEELRLQAEEAERRLRQAEVERARQVQVALETAQRSAEAELQSKRASFAEKTAQLERSLQEEHVAVAQLREEAERRAQQQAEAERAREEAERELERWQLKANEALRLRLQAEEVAQQKSLAQAEAEKQKEEAEREARRRGKAEEQAVRQRELAEQELEKQRQLAEGTAQQRLAAEQELIRLRAETEQGEQQRQLLEEELARLQREAAAATQKRQELEAELAKVRAEMEVLLASKARAEEESRSTSEKSKQRLEAEAGRFRELAEEAARLRALAEEAKRQRQLAEEDAARQRAEAERVLAEKLAAIGEATRLKTEAEIALKEKEAENERLRRLAEDEAFQRRRLEEQAAQHKADIEERLAQLRKASDSELERQKGLVEDTLRQRRQVEEEILALKASFEKAAAGKAELELELGRIRSNAEDTLRSKEQAELEAARQRQLAAEEERRRREAEERVQKSLAAEEEAARQRKAALEEVERLKAKVEEARRLRERAEQESARQLQLAQEAAQKRLQAEEKAHAFAVQQKEQELQQTLQQEQSVLDQLRGEAEAARRAAEEAEEARVQAEREAAQSRRQVEEAERLKQSAEEQAQARAQAQAAAEKLRKEAEQEAARRAQAEQAALRQKQAADAEMEKHKKFAEQTLRQKAQVEQELTTLRLQLEETDHQKNLLDEELQRLKAEATEAARQRSQVEEELFSVRVQMEELSKLKARIEAENRALILRDKDNTQRFLQEEAEKMKQVAEEAARLSVAAQEAARLRQLAEEDLAQQRALAEKMLKEKMQAVQEATRLKAEAELLQQQKELAQEQARRLQEDKEQMAQQLAEETQGFQRTLEAERQRQLEMSAEAERLKLRVAEMSRAQARAEEDAQRFRKQAEEIGEKLHRTELATQEKVTLVQTLEIQRQQSDHDAERLREAIAELEREKEKLQQEAKLLQLKSEEMQTVQQEQLLQETQALQQSFLSEKDSLLQRERFIEQEKAKLEQLFQDEVAKAQQLREEQQRQQQQMEQERQRLVASMEEARRRQHEAEEGVRRKQEELQQLEQQRRQQEELLAEENQRLREQLQLLEEQHRAALAHSEEVTASQVAATKTLPNGRDALDGPAAEAEPEHSFDGLRRKVSAQRLQEAGILSAEELQRLAQGHTTVDELARREDVRHYLQGRSSIAGLLLKATNEKLSVYAALQRQLLSPGTALILLEAQAASGFLLDPVRNRRLTVNEAVKEGVVGPELHHKLLSAERAVTGYKDPYTGQQISLFQAMQKGLIVREHGIRLLEAQIATGGVIDPVHSHRVPVDVAYRRGYFDEEMNRVLADPSDDTKGFFDPNTHENLTYLQLLERCVEDPETGLCLLPLTDKAAKGGELVYTDSEARDVFEKATVSAPFGKFQGKTVTIWEIINSEYFTAEQRRDLLRQFRTGRITVEKIIKIIITVVEEQEQKGRLCFEGLRSLVPAAELLESRVIDRELYQQLQRGERSVRDVAEVDTVRRALRGANVIAGVWLEEAGQKLSIYNALKKDLLPSDMAVALLEAQAGTGHIIDPATSARLTVDEAVRAGLVGPEFHEKLLSAEKAVTGYRDPYTGQSVSLFQALKKGLIPREQGLRLLDAQLSTGGIVDPSKSHRVPLDVACARGCLDEETSRALSAPRADAKAYSDPSTGEPATYGELQQRCRPDQLTGLSLLPLSEKAARARQEELYSELQARETFEKTPVEVPVGGFKGRTVTVWELISSEYFTAEQRQELLRQFRTGKVTVEKVIKILITIVEEVETLRQERLSFSGLRAPVPASELLASGVLSRAQFEQLKDGKTTVKDLSELGSVRTLLQGSGCLAGIYLEDTKEKVSIYEAMRRGLLRATTAALLLEAQAATGFLVDPVRNQRLYVHEAVKAGVVGPELHEQLLSAEKAVTGYRDPYSGSTISLFQAMQKGLVLRQHGIRLLEAQIATGGIIDPVHSHRVPVDVAYQRGYFSEEMNRVLADPSDDTKGFFDPNTHENLTYRQLLERCVEDPETGLRLLPLKGAEKAEVVETTQVYTEEETRRAFEETQIDIPGGGSHGGSTMSLWEVMQSDLIPEEQRAQLMADFQAGRVTKERMIIIIIEIIEKTEIIRQQGLASYDYVRRRLTAEDLFEARIISLETYNLLREGTRSLREALEAESAWCYLYGTGSVAGVYLPGSRQTLSIYQALKKGLLSAEVARLLLEAQAATGFLLDPVKGERLTVDEAVRKGLVGPELHDRLLSAERAVTGYRDPYTEQTISLFQAMKKELIPTEEALRLLDAQLATGGIVDPRLGFHLPLEVAYQRGYLNKDTHDQLSEPSEVRSYVDPSTDERLSYTQLLRRCRRDDGTGQLLLPLSDARKLTFRGLRKQITMEELVRSQVMDEATALQLREGLTSIEEVTKNLQKFLEGTSCIAGVFVDATKERLSVYQAMKKGIIRPGTAFELLEAQAATGYVIDPIKGLKLTVEEAVRMGIVGPEFKDKLLSAERAVTGYKDPYSGKLISLFQAMKKGLILKDHGIRLLEAQIATGGIIDPEESHRLPVEVAYKRGLFDEEMNEILTDPSDDTKGFFDPNTEENLTYLQLMERCITDPQTGLCLLPLKEKKRERKTSSKSSVRKRRVVIVDPETGKEMSVYEAYRKGLIDHQTYLELSEQECEWEEITISSSDGVVKSMIIDRRSGRQYDIDDAIAKNLIDRSALDQYRAGTLSITEFADMLSGNAGGFRSRSSSVGSSSSYPISPAVSRTQLASWSDPTEETGPVAGILDTETLEKVSITEAMHRNLVDNITGQRLLEAQACTGGIIDPSTGERFPVTDAVNKGLVDKIMVDRINLAQKAFCGFEDPRTKTKMSAAQALKKGWLYYEAGQRFLEVQYLTGGLIEPDTPGRVPLDEALQRGTVDARTAQKLRDVGAYSKYLTCPKTKLKISYKDALDRSMVEEGTGLRLLEAAAQSTKGYYSPYSVSGSGSTAGSRTGSRTGSRAGSRRGSFDATGSGFSMTFSSSSYSSSGYGRRYASGSSASLGGPESAVA

SEQ ID NO: 3094 - protein, 529 aa, Homo sapiens
MSSTVSYWILNSTRNSIATLQGGRRLYSRYVSNRNKLKWRLFSRVPPTLNSSPCGGFTLCKAYRHTSTEEDDFHLQLSPEQINEVLRAGETTHKILDLESRVPNSVLRFESNQLAANSPVEDRRGVASCLQTNGLMFGIFDGHGGHACAQAVSERLFYYVAVSLMSHQTLEHMEGAMESMKPLLPILHWLKHPGDSIYKDVTSVHLDHLRVYWQELLDLHMEMGLSIEEALMYSFQRLDSDISLEIQAPLEDEVTRNLSLQVAFSGATACMAHVDGIHLHVANAGDCRAILGVQEDNGMWSCLPLTRDHNAWNQAELSRLKREHPESEDRTIIMEDRLLGVLIPCRAFGDVQLKWSKELQRSILERGFNTEALNIYQFTPPHYYTPPYLTAEPEVTYHRLRPQDKFLVLASDGLWDMLSNEDVVRLVVGHLAEADWHKTDLAQRPANLGLMQSLLLQRKASGLHEADQNAATRLIRHAIGNNEYGEMEAERLAAMLTLPEDLARMYRDDITVTVVYFNSESIGAYYKGG

SEQ ID NO: 3095 - protein, 553 aa, Homo sapiens
MAAPAGGGGSAVSVLAPNGRRHTVKVTPSTVLLQVLEDTCRRQDFNPCEYDLKFQRSVLDLSLQWRFANLPNNAKLEMVPASRSREGPENMVRIALQLDDGSRLQDSFCSGQTLWELLSHFPQIRECLQHPGGATPVCVYTRDEVTGEAALRGTTLQSLGLTGGSATIRFVMKCYDPVGKTPGSLGSSASAGQAAASAPLPLESGELSRGDLSRPEDADTSGPCCEHTQEKQSTRAPAAAPFVPFSGGGQRLGGPPGPTRPLTSSSAKLPKSLSSPGGPSKPKKSKSGQDPQQEQEQERERDPQQEQERERPVDREPVDREPVVCHPDLEERLQAWPAELPDEFFELTVDDVRRRLAQLKSERKRLEEAPLVTKAFREAQIKEKLERYPKVALRVLFPDRYVLQGFFRPSETVGDLRDFVRSHLGNPELSFYLFITPPKTVLDDHTQTLFQANLFPAALVHLGAEEPAGVYLEPGLLEHAISPSAADVLVARYMSRAAGSPSPLPAPDPAPKSEPAAEEGALVPPEPIPGTAQPVKRSLGKVPKWLKLPASKR

SEQ ID NO: 3096 - protein, 279 aa, Homo sapiens
MDLMNGQASSVNIAATASEKSSSSESLSDKGSELKKSFDAVVFDVLKVTPEEYAGQITLMDVPVFKAIQPDELSSCGWNKKEKYSSAPNAVAFTRRFNHVSFWVVREILHAQTLKIRAEVLSHYIKTAKKLYELNNLHALMAVVSGLQSAPIFRLTKTWALLSRKDKTTFEKLEYVMSKEDNYKRLRDYISSLKMTPCIPYLGIYLSDLTYIDSAYPSTGSILENEQRSNLMNNILRIISDLQQSCEYDIPMLPHVQKYLNSVQYIEELQKFVEDDNYK

SEQ ID NO: 3097 - protein, 583 aa, Homo sapiens
MDLMNGQASSVNIAATASEKSSSSESLSDKGSELKKSFDAVVFDVLKVTPEEYAGQITLMDVPVFKAIQPDELSSCGWNKKEKYSSAPNAVAFTRRFNHVSFWVVREILHAQTLKIRAEVLSHYIKTAKKLYELNNLHALMAVVSGLQSAPIFRLTKTWALLSRKDKTTFEKLEYVMSKEDNYKRLRDYISSLKMTPCIPYLGIYLSDLTYIDSAYPSTGSILENEQRSNLMNNILRIISDLQQSCEYDIPMLPHVQKYLNSVQYIEELQKFVEDDNYKLSLKIEPGTSTPRSAASREDLVGPEVGASPQSGRKSVAAEGALLPQTPPSPRNLIPHGHRKCHSLGYNFIHKMNTAEFKSATFPNAGPRHLLDDSVMEPHAPSRGQAESSTLSSGISIGSSDGSELSEETSWPAFERNRLYHSLGPVTRVARNGYRSHMKASSSAESEDLAVHLYPGAVTIQGVLRRKTLLKEGKKPTVASWTKYWAALCGTQLFYYAAKSLKATERKHFKSTSNKNVSVIGWMVMMADDPEHPDLFLLTDSEKGNSYKFQAGNRMNAMLWFKHLSAACQSNKQQVPTNLMTFE

SEQ ID NO: 3098 - protein, 421 aa, Homo sapiens
MPFLHGFRRIIFEYQPLVDAILGSLGIQDPERQESLDRPSYVASEESRILVLTELLERKAHSPFYQEGVSNALLKMAELGLTRAADVLLRHGANLNFEDPVTYYTALHIAVLRNQPDMVELLVHHGADVNRRDRIHESSPLDLASEEPERLPCLQRLLDLGADVNAADKHGKTALLHALASSDGVQIHNTENIRLLLEGGADVKATTKDGDTVFTCIIFLLGETVGGDKEEAQMINRFCFQVTRLLLAHGADPSECPAHESLTHICLKSFKLHFPLLRFLLESGAAYNCSLHGASCWSGFHIIFERLCSHPGCTEDESHADLLRKAETVLDLMVTNSQKLQLPENFDIHPVGSLAEKIQALHFSLRQLESYPPPLKHLCRVAIRLYLQPWPVDVKVKALPLPDRLKWYLLSEHSGSVEDDI

SEQ ID NO: 3099 - protein, 197 aa, Homo sapiens
MPFLHGFRRIIFEYQPLVDAILGSLGIQDPERQESLDRPSYVASEESRILVLTELLERKAHSPFYQEGVSNALLKMAELGLTRAADVLLRHGANLNFEDPVTYYTALHIAVLRNQPDMVELLVHHGADVNRRDREKLLCSMLWPAATGCRSTILRTFVSYWKEGQTSRPPPKMGTQCSPASSSCLVRPWEGTKRRPR

SEQ ID NO: 3100 - protein, 818 aa, Homo sapiens
MALTQVRLTFRDVAIEFSQEEWKCLDPAQRILYRDVMLENYWNLVSLGLCHFDMNIISMLEEGKEPWTVKSCVKIARKPRTPECVKGVVTDIPPKCTIKDLLPKEKSSTEAVFHTVVLERHESPDIEDFSFKEPQKNVHDFECQWRDDTGNYKGVLMAQKEGKRDQRDRRDIENKLMNNQLGVSFHSHLPELQLFQGEGKMYECNQVEKSTNNGSSVSPLQQIPSSVQTHRSKKYHELNHFSLLTQRRKANSCGKPYKCNECGKAFTQNSNLTSHRRIHSGEKPYKCSECGKTFTVRSNLTIHQVIHTGEKPYKCHECGKVFRHNSYLATHRRIHTGEKPYKCNECGKAFRGHSNLTTHQLIHTGEKPFKCNECGKLFTQNSHLISHWRIHTGEKPYKCNECGKAFSVRSSLAIHQTIHTGEKPYKCNECGKVFRYNSYLGRHRRVHTGEKPYKCNECGKAFSMHSNLATHQVIHTGTKPFKCNECSKVFTQNSQLANHRRIHTGEKPYKCNECGKAFSVRSSLTTHQAIHSGEKPYKCIECGKSFTQKSHLRSHRGIHSGEKPYKCNECGKVFAQTSQLARHWRVHTGEKPYKCNDCGRAFSDRSSLTFHQAIHTGEKPYKCHECGKVFRHNSYLATHRRIHTGEKPYKCNECGKAFSMHSNLTTHKVIHTGEKPYKCNQCGKVFTQNSHLANHQRTHTGEKPYRCNECGKAFSVRSSLTTHQAIHTGKKPYKCNECGKVFTQNAHLANHRRIHTGEKPYRCTECGKAFRVRSSLTTHMAIHTGEKRYKCNECGKVFRQSSNLASHHRMHTGEKPYK

SEQ ID NO: 3101 - protein, 818 aa, Homo sapiens; identical to SEQ ID NO: 3100

SEQ ID NO: 3102 - protein, 404 aa, Homo sapiens
MAGRRAQPGSAPPRPAAPHPRPASRAFPQHCRPRDAERPPSPRSPLMPGCELPVGTCPDMCPAAERAQREREHRLHRLEVVPGCRQDPPRADPQRAVKEYSRPAAGKPRPPPSQLRPPSVLLATVRYLAGEVAESADIARAEVASFVADRLRAVRLDLALQGAGDAEAAVVLEAALATLLAVVARLGPDAARGPADPVLLQAQVQEGFGSLRRCYARGAGPHPRQPAFQGLFLLYNLGSVEALHEVLQLPAALRACPPLRKALAVDAAFREGNAARLFRLLQTLPYLPSCAVQCHVGHARREALARFARAFSTPKGQTLPLGFMVNLLALDGLREARDLCQAHGLPLDGEERVVFLRGRYVEEGLPPASTCKVLVESKLRGRTLEEVVMAEEEDEGTDRPGSPA

SEQ ID NO: 3103 - protein, 504 aa, Homo sapiens
MAGLKRRVPLHSLRYFISMVGLFSKPGLLPWYARNPPGWSQLFLGTVCKGDFTRVIATKCQKGQKSQKKPSHLGPLDGSWQERLADVVTPLWRLSYEEQLKVKFAAQKKILQRLESYIQMLNGVSVTTAVPKSERLSCLLHPIIPSPVINGYRNKSTFSVNRGPDGNPKTVGFYLGTWRDGNVVCVQSNHLKNIPEKHSQVAQYYEVFLRQSPLEPCLVFHEGGYWRELTVRTNSQGHTMAIITFHPQKLSQEELHVQKEIVKEFFIRGPGAACGLTSLYFQESTMTRCSHQQSPYQLLFGEPYIFEELLSLKIRISPDAFFQINTAGAEMLYRTVGELTGVNSDTILLDICCGTGVIGLSLAQHTSRVLGIELLEQAVEDARWTAAFNGITNSEFHTGQAEKILPGLLKSKEDGQSIVAVVNPARAGLHYKVIQAIRNFRAIHTLVFVSCKLHGESTRNVIELCCPPDPAKKLLGEPFVLQQAVPVDLFPHTPHCELVLLFTR

SEQ ID NO: 3104 - protein, 188 aa, Homo sapiens
MAEVEAPTAAETDMKQYQGSGGVAMDVERSRFPYCVVWTPIPVLTWFFPIIGHMGICTSTGVIRDFAGPYFVSEDNMAFGKPAKYWKLDPAQVYASGPNAWDTAVHDASEEYKHRMHNLCCDNCHSHVALALNLMRYNNSTNWNMVTLCFFCLLYGKYVSVGAFVKTWLPFILLLGIILTVSLVFNLR

SEQ ID NO: 3105 - protein, 294 aa, Homo sapiens
MEYPAPATVQAADGGAAGPYSSSELLEGQEPDGVRFDRERARRLWEAVSGAQPVGREEVEHMIQKNQCLFTNTQCKVCCALLISESQKLAHYQSKKHANKVKRYLAIHGMETLKGETKKLDSDQKSSRSKDKNQCCPICNMTFSSPVVAQSHYLGKTHAKNLKLKQQSTKVEALHQNREMIDPDKFCSLCHATFNDPVMAQQHYVGKKHRKQETKLKLMARYGRLADPAVTDFPAGKGYPCKTCKIVLNSIEQYQAHVSGFKHKNQSPKTVASSLGQIPMQRQPIQKDSTTLED

SEQ ID NO: 3106 - protein, 166 aa, Homo sapiens
MTQFLPPNLLALFAPRDPIPYLPPLEKLPHEKHHNQPYCGIAPYIREFEDPRDAPPPTRAETREERMERKRREKIERRQQEVETELKMWDPHNDPNAQGDAFKTLFVARVNYDTTESKLRREFEVYGPIKRIHMVYSKRSGKPRGYAFIEYEHERDMHSTTQLACS

SEQ ID NO: 3107 - protein, 437 aa, Homo sapiens
MTQFLPPNLLALFAPRDPIPYLPPLEKLPHEKHHNQPYCGIAPYIREFEDPRDAPPPTRAETREERMERKRREKIERRQQEVETELKMWDPHNDPNAQGDAFKTLFVARVNYDTTESKLRREFEVYGPIKRIHMVYSKRSGKPRGYAFIEYEHERDMHSAYKHADGKKIDGRRVLVDVERGRTVKGWRPRRLGGGLGGTRRGGADVNIRHSGRDDTSRYDERPGPSPLPHRDRDRDRERERRERSRERDKERERRRSRSRDRRRRSRSRDKEERRRSRERSKDKDRDRKRRSSRSRERARRERERKEELRGGGGDMAEPSEAGDAPPDDGPPGELGPDGPDGPEEKGRDRDRERRRSHRSERERRRDRDRDRDRDREHKRGERGSERGRDEARGGGGGQDNGLEGLGNDSRDMYMESEGGDGYLAPENGYLMEAAPE

SEQ ID NO: 3108 - protein, 232 aa, Homo sapiens
MDSPEVTFTLAYLVFAVCFVFTPNEFHAAGLTVQNLLSGWLGSEDAAFVPFHLRRTAATLLCHSLLPLGYYVGMCLAASEKRLHALSQAPEAWRLFLLLAVTLPSIACILIYYWSRDRWACHPLARTLALYALPQSGWQAVASSVNTEFRRIDKFATGAPGARVIVTDTWVMKVTTYRVHVAQQQDVHLTVTESRQHELSPDSNLPVQLLTIRVASTNPAVQAFDIWSWRPA

SEQ ID NO: 3109 - protein, 483 aa, Homo sapiens
MKAFHTFCVVLLVFGSVSEAKFDDFEDEEDIVEYDDNDFAEFEDVMEDSVTESPQRVIITEDDEDETTVELEGQDENQEGDFEDADTQEGDTESEPYDDEEFEGYEDKPDTSSSKNKDPITIVDVPAHLQNSWESYYLEILMVTGLLAYIMNYIIGKNKNSRLAQAWFNTHRELLESNFTLVGDDGTNKEATSTGKLNQENEHIYNLWCSGRVCCEGMLIQLRFLKRQDLLNVLARMMRPVSDQVQIKVTMNDEDMDTYVFAVGTRKALVRLQKEMQDLSEFCSDKPKSGAKYGLPDSLAILSEMGEVTDGMMDTKMVHFLTHYADKIESVHFSDQFSGPKIMQEEGQPLKLPDTKRTLLFTFNVPGSGNTYPKDMEALLPLMNMVIYSIDKAKKFRLNREGKQKADKNRARVEENFLKLTHVQRQEAAQSRREEKKRAEKERIMNEEDPEKQRRLEEAALRRAKKKLEKKQMKMKQIKVKAM

SEQ ID NO: 3110 - protein, 736 aa, Homo sapiens
MGSPLRFDGRVVLVTGAGAGLGRAYALAFAERGALVVVNDLGGDFKGVGKGSLAADKVVEEIRRRGGKAVANYDSVEEGEKVVKTALDAFGRIDVVVNNAGILRDRSFARISDEDWDIIHRVHLRGSFQVTRAAWEHMKKQKYGRIIMTSSASGIYGNFGQANYSAAKLGLLGLANSLAIEGRKSNIHCNTIAPNAGSRMTQTVMPEDLVEALKPEYVAPLVLWLCHESCEENGGLFEVGAGWIGKLRWERTLGAIVRQKNHPMTPEAVKANWKKICDFENASKPQSIQESTGSIIEVLSKIDSEGGVSANHTSRATSTATSGFAGAIGQKLPPFSYAYTELEAIMYALGVGASIKDPKDLKFIYEGSSDFSCLPTFGVIIGQKSMMGGGLAEIPGLSINFAKVLHGEQYLELYKPLPRAGKLKCEAVVADVLDKGSGVVIIMDVYSYSEKELICHNQFSLFLVGSGGFGGKRTSDKVKVAVAIPNRPPDAVLTDTTSLNQAALYRLSGDWNPLHIDPNFASLAGFDKPILHGLCTFGFSARRVLQQFADNDVSRFKAIKARFAKPVYPGQTLQTEMWKEGNRIHFQTKVQETGDIVISNAYVDLAPTSGTSAKTPSEGGKLQSTFVFEEIGRRLKDIGPEVVKKVNAVFEWHITKGGNIGAKWTIDLKSGSGKVYQGPAKGAADTTIILSDEDFMEVVLGKLDPQKAFFSGRLKARGNIMLSQKLQMILKDYAKL

SEQ ID NO: 3111 - protein, 486 aa, Homo sapiens
MNGTLDHPDQPDLDAIKMFVGQVPRTWSEKDLRELFEQYGAVYEINVLRDRSQNPPQSKGCCFVTFYTRKAALEAQNALHNMKVLPGMHHPIQMKPADSEKNNAVEDRKLFIGMISKKCTENDIRVMFSSFGQIEECRILRGPDGLSRGCAFVTFTTRAMAQTAIKAMHQAQTMEGCSSPMVVKFADTQKDKEQKRMAQQLQQQMQQISAASVWGNLAGLNTLGPQYLALYLQLLQQTASSGNLNTLSSLHPMGGLNAMQLQNLAALAAAASAAQNTPSGTNALTTSSSPLSVLTSSGSSPSSSSSNSVNPIASLGALQTLAGATAGLNVGSLAGMAALNGGLGSSGLSNGTGSTMEALTQAYSGIQQYAAAALPTLYNQNLLTQQSIGAAGSQKEGPEGANLFIYHLPQEFGDQDLLQMFMPFGNVVSAKVFIDKQTNLSKCFGFVSYDNPVSAQAAIQSMNGFQIGMKRLKVQLKRSKNDSKPY

SEQ ID NO: 3112 - protein, 482 aa, Homo sapiens
MNGTLDHPDQPDLDAIKMFVGQVPRTWSEKDLRELFEQYGAVYEINVLRDRSQNPPQSKGCCFVTFYTRKAALEAQNALHNMKVLPGMHHPIQMKPADSEKNNAVEDRKLFIGMISKKCTENDIRVMFSSFGQIEECRILRGPDGLSRGCAFVTFTTRAMAQTAIKAMHQAQTMEGCSSPMVVKFADTQKDKEQKRMAQQLQQQMQQISAASVWGNLAGLNTLGPQYLALLQQTASSGNLNTLSSLHPMGGLNAMQLQNLAALAAAASAAQNTPSGTNALTTSSSPLSVLTSSGSSPSSSSSNSVNPIASLGALQTLAGATAGLNVGSLAGMAALNGGLGSSGLSNGTGSTMEALTQAYSGIQQYAAAALPTLYNQNLLTQQSIGAAGSQKEGPEGANLFIYHLPQEFGDQDLLQMFMPFGNVVSAKVFIDKQTNLSKCFGFVSYDNPVSAQAAIQSMNGFQIGMKRLKVQLKRSKNDSKPY

SEQ ID NO: 3113 - protein, 483 aa, Homo sapiens
MNGTLDHPDQPDLDAIKMFVGQVPRTWSEKDLRELFEQYGAVYEINVLRDRSQNPPQSKGCCFVTFYTRKAALEAQNALHNMKVLPGMHHPIQMKPADSEKNNAVEDRKLFIGMISKKCTENDIRVMFSSFGQIEECRILRGPDGLSRGCAFVTFTTRAMAQTAIKAMHQAQTMEGCSSPMVVKFADTQKDKEQKRMAQQLQQQMQQISAASVWGNLAGLNTLGPQYLALLQQTASSGNLNTLSSLHPMGGLNAMQLQNLAALAAAASAAQNTPSGTNALTTSSSPLSVLTSSAGSSPSSSSSNSVNPIASLGALQTLAGATAGLNVGSLAGMAALNGGLGSSGLSNGTGSTMEALTQAYSGIQQYAAAALPTLYNQNLLTQQSIGAAGSQKEGPEGANLFIYHLPQEFGDQDLLQMFMPFGNVVSAKVFIDKQTNLSKCFGFVSYDNPVSAQAAIQSMNGFQIGMKRLKVQLKRSKNDSKPY

SEQ ID NO: 3114 - protein, 1893 aa, Homo sapiens
MGPGCDLLLRTAATITAAAIMSDTDSDEDSAGGGPFSLAGFLFGNINGAGQLEGESVLDDECKKHLAGLGALGLGSLITELTANEELTGTDGALVNDEGWVRSTEDAVDYSDINEVAEDESRRYQQTMGSLQPLCHSDYDEDDYDADCEDIDCKLMPPPPPPPGPMKKDKDQDSITGVSENGEGIILPSIIAPSSLASEKVDFSSSSDSESEMGPQEATQAESEDGKLTLPLAGIMQHDATKLLPSVTELFPEFRPGKVLRFLRLFGPGKNVPSVWRSARRKRKKKHRELIQEEQIQEVECSVESEVSQKSLWNYDYAPPPPPEQCLSDDEITMMAPVESKFSQSTGDIDKVTDTKPRVAEWRYGPARLWYDMLGVPEDGSGFDYGFKLRKTEHEPVIKSRMIEEFRKLEENNGTDLLADENFLMVTQLHWEDDIIWDGEDVKHKGTKPQRASLAGWLPSSMTRNAMAYNVQQGFAATLDDDKPWYSIFPIDNEDLVYGRWEDNIIWDAQAMPRLLEPPVLTLDPNDENLILEIPDEKEEATSNSPSKESKKESSLKKSRILLGKTGVIKEEPQQNMSQPEVKDPWNLSNDEYYYPKQQGLRGTFGGNIIQHSIPAVELRQPFFPTHMGPIKLRQFHRPPLKKYSFGALSQPGPHSVQPLLKHIKKKAKMREQERQASGGGEMFFMRTPQDLTGKDGDLILAEYSEENGPLMMQVGMATKIKNYYKRKPGKDPGAPDCKYGETVYCHTSPFLGSLHPGQLLQAFENNLFRAPIYLHKMPETDFLIIRTRQGYYIRELVDIFVVGQQCPLFEVPGPNSKRANTHIRDFLQVFIYRLFWKSKDRPRRIRMEDIKKAFPSHSESSIRKRLKLCADFKRTGMDSNWWVLKSDFRLPTEEEIRAMVSPEQCCAYYSMIAAEQRLKDAGYGEKSFFAPEEENEEDFQMKIDDEVRTAPWNTTRAFIAAMKGKCLLEVTGVADPTGCGEGFSYVKIPNKPTQQKDDKEPQPVKKTVTGTDADLRRLSLKNAKQLLRKFGVPEEEIKKLSRWEVIDVVRTMSTEQARSGEGPMSKFARGSRFSVAEHQERYKEECQRIFDLQNKVLSSTEVLSTDTDSSSAEDSDFEEMGKNIENMLQNKKTSSQLSREREEQERKELQRMLLAAGSAASGNNHRDDDTASVTSLNSSATGRCLKIYRTFRDEEGKEYVRCETVRKPAVIDAYVRIRTTKDEEFIRKFALFDEQHREEMRKERRRIQEQLRRLKRNQEKEKLKGPPEKKPKKMKERPDLKLKCGACGAIGHMRTNKFCPLYYQTNAPPSNPVAMTEEQEEELEKTVIHNDNEELIKVEGTKIVLGKQLIESADEVRRKSLVLKFPKQQLPPKKKRRVGTTVHCDYLNRPHKSIHRRRTDPMVTLSSILESIINDMRDLPNTYPFHTPVNAKVVKDYYKIITRPMDLQTLRENVRKRLYPSREEFREHLELIVKNSATYNGPKHSLTQISQSMLDLCDEKLKEKEDKLARLEKAINPLLDDDDQVAFSFILDNIVTQKMMAVPDSWPFHHPVNKKFVPDYYKVIVNPMDLETIRKNISKHKYQSRESFLDDVNLILANSVKYNGPESQYTKTAQEIVNVCYQTLTEYDEHLTQLEKDICTAKEAALEEAELESLDPMTPGPYTPQPPDLYDTNTSLSMSRDASVFQDESNMSVLDIPSATPEKQVTQEGEDGDGDLADEEEGTVQQPQASVLYEDLLMSEGEDDEEDAGSDEEGDNPFSAIQLSESGSDSDVGSGGIRPKQPRMLQENTRMDMENEESMMSYEGDGGEASHGLEDSNISYGSYEEPDPKSNTQDTSFSSIGGYEVSEEEEDEEEEEQRSGPSVLSQVHLSEDEEDSEDFHSIAGDSDLDSDE

SEQ ID NO: 3115 - protein, 1872 aa, Homo sapiens
MGPGCDLLLRTAATITAAAIMSDTDSDEDSAGGGPFSLAGFLFGNINGAGQLEGESVLDDECKKHLAGLGALGLGSLITELTANEELTGTDGALVNDEGWVRSTEDAVDYSDINEVAEDESRRYQQTMGSLQPLCHSDYDEDDYDADCEDIDCKLMPPPPPPPGPMKKDKDQDSITGEKVDFSSSSDSESEMGPQEATQAESEDGKLTLPLAGIMQHDATKLLPSVTELFPEFRPGKVLRFLRLFGPGKNVPSVWRSARRKRKKKHRELIQEEQIQEVECSVESEVSQKSLWNYDYAPPPPPEQCLSDDEITMMAPVESKFSQSTGDIDKVTDTKPRVAEWRYGPARLWYDMLGVPEDGSGFDYGFKLRKTEHEPVIKSRMIEEFRKLEENNGTDLLADENFLMVTQLHWEDDIIWDGEDVKHKGTKPQRASLAGWLPSSMTRNAMAYNVQQGFAATLDDDKPWYSIFPIDNEDLVYGRWEDNIIWDAQAMPRLLEPPVLTLDPNDENLILEIPDEKEEATSNSPSKESKKESSLKKSRILLGKTGVIKEEPQQNMSQPEVKDPWNLSNDEYYYPKQQGLRGTFGGNIIQHSIPAVELRQPFFPTHMGPIKLRQFHRPPLKKYSFGALSQPGPHSVQPLLKHIKKKAKMREQERQASGGGEMFFMRTPQDLTGKDGDLILAEYSEENGPLMMQVGMATKIKNYYKRKPGKDPGAPDCKYGETVYCHTSPFLGSLHPGQLLQAFENNLFRAPIYLHKMPETDFLIIRTRQGYYIRELVDIFVVGQQCPLFEVPGPNSKRANTHIRDFLQVFIYRLFWKSKDRPRRIRMEDIKKAFPSHSESSIRKRLKLCADFKRTGMDSNWWVLKSDFRLPTEEEIRAMVSPEQCCAYYSMIAAEQRLKDAGYGEKSFFAPEEENEEDFQMKIDDEVRTAPWNTTRAFIAAMKGKCLLEVTGVADPTGCGEGFSYVKIPNKPTQQKDDKEPQPVKKTVTGTDADLRRLSLKNAKQLLRKFGVPEEEIKKLSRWEVIDVVRTMSTEQARSGEGPMSKFARGSRFSVAEHQERYKEECQRIFDLQNKVLSSTEVLSTDTDSSSAEDSDFEEMGKNIENMLQNKKTSSQLSREREEQERKELQRMLLAAGSAASGNNHRDDDTASVTSLNSSATGRCLKIYRTFRDEEGKEYVRCETVRKPAVIDAYVRIRTTKDEEFIRKFALFDEQHREEMRKERRRIQEQLRRLKRNQEKEKLKGPPEKKPKKMKERPDLKLKCGACGAIGHMRTNKFCPLYYQTNAPPSNPVAMTEEQEEELEKTVIHNDNEELIKVEGTKIVLGKQLIESADEVRRKSLVLKFPKQQLPPKKKRRVGTTVHCDYLNRPHKSIHRRRTDPMVTLSSILESIINDMRDLPNTYPFHTPVNAKVVKDYYKIITRPMDLQTLRENVRKRLYPSREEFREHLELIVKNSATYNGPKHSLTQISQSMLDLCDEKLKEKEDKLARLEKAINPLLDDDDQVAFSFILDNIVTQKMMAVPDSWPFHHPVNKKFVPDYYKVIVNPMDLETIRKNISKHKYQSRESFLDDVNLILANSVKYNGPESQYTKTAQEIVNVCYQTLTEYDEHLTQLEKDICTAKEAALEEAELESLDPMTPGPYTPQPPDLYDTNTSLSMSRDASVFQDESNMSVLDIPSATPEKQVTQEGEDGDGDLADEEEGTVQQPQASVLYEDLLMSEGEDDEEDAGSDEEGDNPFSAIQLSESGSDSDVGSGGIRPKQPRMLQENTRMDMENEESMMSYEGDGGEASHGLEDSNISYGSYEEPDPKSNTQDTSFSSIGGYEVSEEEEDEEEEEQRSGPSVLSQVHLSEDEEDSEDFHSIAGDSDLDSDE

SEQ ID NO: 3116 - protein, 821 aa, Homo sapiens
MDPECAQLLPALCAVLVDPGQPVADDTCLEKLLDWFKTVTEGESSVVLLQEHPCLVELLSHVLKVQDLSSGVLSFSLRLAGTFAAQENCFQYLQQGELLPGLFGEPGPLGRATWAVPTVRSGWIQGLRSLAQHPSALRFLADHGAVDTIFSLQGDSSLFVASAASQLLVHVLALSMRGGAEGQPCLPGGDWPACAQKIMDHVEESLCSAATPKVTQALNVLTTTFGRCQSPWTEALWVRLSPRVACLLERDPIPAAHSFVDLLLCVARSPVFSSSDGSLWETVARALSCLGPTHMGPLALGILKLEHCPQALRTQAFQVLLQPLACVLKATVQAPGPPGLLDGTADDATTVDTLLASKSSCAGLLCRTLAHLEELQPLPQRPSPWPQASLLGATVTVLRLCDGSAAPASSVGGHLCGTLAGCVRVQRAALDFLGTLSQGTGPQELVTQALAVLLECLESPGSSPTVLKKAFQATLRWLLSSPKTPGCSDLGPLIPQFLRELFPVLQKRLCHPCWEVRDSALEFLTQLSRHWGGQADFRCALLASEVPQLALQLLQDPESYVRASAVTAMGQLSSQGLHAPTSPEHAEARQSLFLELLHILSVDSEGFPRRAVMQVFTEWLRDGHADAAQDTEQFVATVLQAASRDLDWEVRAQGLELALVFLGQTLGPPRTHCPYAVALPEVAPAQPLTEALRALCHVGLFDFAFCALFDCDRPVAQKSCDLLLFLRDKIASYSSLREARGSPNTASAEATLPRWRAGEQAQPPGDQEPEAVLAMLRSLDLEGLRSTLAESSDHVEKSPQSLLQDMLATGGFLQGDEADCY

SEQ ID NO: 3117 - protein, 464 aa, Homo sapiens
MVSGLRLASRSGEEGWLKPAVARLGPPRHRLRNLRTESPWRSRGSVLFCSGPGRAGRAAEPLHPVCTCGRHFRRPDPCREPLASPIQDSVAFEDVAVNFTQEEWALLDSSQKNLYREVMQETCRNLASVGSQWKDQNIEDHFEKPGKDIRNHIVQRLCESKEDGQYGEVVSQIPNLDLNENISTGLKPCECSICGKVFVRHSLFNRHILAHSGYKPYGEKQYKCEQCGKFFVSVPGVRRHMIMHSGNPAYKCTICGKAFYFLNSVERHQRTHTGEKPYKCKQCGKAFTVSGSCLIHERTHTGEKPYECKECGKTFRFSCSFKTHERTHTGERPYKCTKCDKAFSCSTSLRYHGSIHTGERPYECKQCGKAFSRLSSLCNHRSTHTGEKPYECKQCDQAFSRLSSLHLHERIHTGEKPYECKKCGKAYTRSSHLTRHERSHDIEAGCSDSAYNPSTLGGQGVWIA

SEQ ID NO: 3118 - protein, 373 aa, Homo sapiens
MLLGLAAMELKVWVDGIQRVVCGVSEQTTCQEVVIALAQAIGQTGRFVLVQRLREKERQLLPQECPVGAQATCGQFASDVQFVLRRTGPSLAGRPSSDSCPPPERCLIRASLPVKPRAALGCEPRKTLTPEPAPSLSRPGPAAPVTPTPGCCTDLRGLELRVQRNAEELGHEAFWEQELRREQAREREGQARLQALSAATAEHAARLQALDAQARALEAELQLAAEAPGPPSPMASATERLHQDLAVQERQSAEVQGSLALVSRALEAAERALQAQAQELEELNRELRQCNLQQFIQQTGAALPPPPRPDRGPPGTQGPLPPAREESLLGAPSESHAGAQPRPRGGPHDAELLEVAAAPAPEWCPLAAQPQAL

SEQ ID NO: 3119 - protein, 211 aa, Homo sapiens
MSTAAVPELKQISRVEAMRLGPGWSHSCHAMLYAANPGQLFGRIPMRFSVLMQMRFDGLLGFPGGFVDRRFWSLEDGLNRVLGLGLGCLRLTEADYLSSHLTEGPHRVVAHLYARQLTLEQLHAVEISAVHSRDHGLEVLGLVRVPLYTQKDRVGGFPNFLSNAFVSTAKCQLLFALKVLNMMPEEKLVEALAAATEKQKKALEKLLPASS

SEQ ID NO: 3120 - protein, 600 aa, Homo sapiens
MAPSSKSERNSGAGSGGGGPGGAGGKRAAGRRREHVLKQLERVKISGQLSPRLFRKLPPRVCVSLKNIVDEDFLYAGHIFLGFSKCGRYVLSYTSSSGDDDFSFYIYHLYWWEFNVHSKLKLVRQVRLFQDEEIYSDLYLTVCEWPSDASKVIVFGFNTRSANGMLMNMMMMSDENHRDIYVSTVAVPPPGRCAACQDASRAHPGDPNAQCLRHGFMLHTKYQVVYPFPTFQPAFQLKKDQVVLLNTSYSLVACAVSVHSAGDRSFCQILYDHSTCPLAPASPPEPQSPELPPALPSFCPEAAPARSSGSPEPSPAIAKAKEFVADIFRRAKEAKGGVPEEARPALCPGPSGSRCRAHSEPLALCGETAPRDSPPASEAPASEPGYVNYTKLYYVLESGEGTEPEDELEDDKISLPFVVTDLRGRNLRPMRERTAVQGQYLTVEQLTLDFEYVINEVIRHDATWGHQFCSFSDYDIVILEVCPETNQVLINIGLLLLAFPSPTEEGQLRPKTYHTSLKVAWDLNTGIFETVSVGDLTEVKGQTSGSVWSSYRKSCVDMVMKWLVPESSGRYVNRMTNEALHKGCSLKVLADSERYTWIVL

SEQ ID NO: 3121 - protein, 2115 aa, Homo sapiens
MTLHATRGAALLSWVNSLHVADPVEAVLQLQDCSIFIKIIDRIHGTEEGQQILKQPVSERLDFVCSFLQKNRKHPSSPECLVSAQKVLEGSELELAKMTMLLLYHSTMSSKSPRDWEQFEYKIQAELAVILKFVLDHEDGLNLNEDLENFLQKAPVPSTCSSTFPEELSPPSHQAKREIRFLELQKVASSSSGNNFLSGSPASPMGDILQTPQFQMRRLKKQLADERSNRDELELELAENRKLLTEKDAQIAMMQQRIDRLALLNEKQAASPLEPKELEELRDKNESLTMRLHETLKQCQDLKTEKSQMDRKINQLSEENGDLSFKLREFASHLQQLQDALNELTEEHSKATQEWLEKQAQLEKELSAALQDKKCLEEKNEILQGKLSQLEEHLSQLQDNPPQEKGEVLGDVLQLETLKQEAATLAANNTQLQARVEMLETERGQQEAKLLAERGHFEEEKQQLSSLITDLQSSISNLSQAKEELEQASQAHGARLTAQVASLTSELTTLNATIQQQDQELAGLKQQAKEKQAQLAQTLQQQEQASQGLRHQVEQLSSSLKQKEQQLKEVAEKQEATRQDHAQQLATAAEEREASLRERDAALKQLEALEKEKAAKLEILQQQLQVANEARDSAQTSVTQAQREKAELSRKVEELQACVETARQEQHEAQAQVAELELQLRSEQQKATEKERVAQEKDQLQEQLQALKESLKVTKGSLEEEKRRAADALEEQQRCISELKAETRSLVEQHKRERKELEEERAGRKGLEARLQQLGEAHQAETEVLRRELAEAMAAQHTAESECEQLVKEVAAWRERYEDSQQEEAQYGAMFQEQLMTLKEECEKARQELQEAKEKVAGIESHSELQISRQQNELAELHANLARALQQVQEKEVRAQKLADDLSTLQEKMAATSKEVARLETLVRKAGEQQETASRELVKEPARAGDRQPEWLEEQQGRQFCSTQAALQAMEREAEQMGNELERLRAALMESQGQQQEERGQQEREVARLTQERGRAQADLALEKAARAELEMRLQNALNEQRVEFATLQEALAHALTEKEGKDQELAKLRGLEAAQIKELEELRQTVKQLKEQLAKKEKEHASGSGAQSEAAGRTEPTGPKLEALRAEVSKLEQQCQKQQEQADSLERSLEAERASRAERDSALETLQGQLEEKAQELGHSQSALASAQRELAAFRTKVQDHSKAEDEWKAQVARGRQEAERKNSLISSLEEEVSILNRQVLEKEGESKELKRLVMAESEKSQKLEERLRLLQAETASNSARAAERSSALREEVQSLREEAEKQRVASENLRQELTSQAERAEELGQELKAWQEKFFQKEQALSTLQLEHTSTQALVSELLPAKHLCQQLQAEQAAAEKRHREELEQSKQAAGGLRAELLRAQRELGELIPLRQKVAEQERTAQQLRAEKASYAEQLSMLKKAHGLLAEENRGLGERANLGRQFLEVELDQAREKYVQELAAVRADAETRLAEVQREAQSTARELEVMTAKYEGAKVKVLEERQRFQEERQKLTAQVEQLEVFQREQTKQVEELSKKLADSDQASKVQQQKLKAVQAQGGESQQEAQRLQAQLNELQAQLSQKEQAAEHYKLQMEKAKTHYDAKKQQNQELQEQLRSLEQLQKENKELRAEAERLGHELQQAGLKTKEAEQTCRHLTAQVRSLEAQVAHADQQLRDLGKFQVATDALKSREPQAKPQLDLSIDSLDLSCEEGTPLSITSKLPRTQPDGTSVPGEPASPISQRLPPKVESLESLYFTPIPARSQAPLESSLDSLGDVFLDSGRKTRSARRRTTQIINITMTKKLDVEEPDSANSSFYSTRSAPASQASLRATSSTQSLARLGSPDYGNSALLSLPGYRPTTRSSARRSQAGVSSGAPPGRNSFYMGTCQDEPEQLDDWNRIAELQQRNRVCPPHLKTCYPLESRPSLSLGTITDEEMKTGDPQETLRRASMQPIQIAEGTGITTRQQRKRVSLEPHQGPGTPESKKATSCFPRPMTPRDRHEGRKQSTTEAQKKAAPASTKQADRRQSMAFSILNTPKKLGNSLLRRGASKKALSKASPNTRSGTRRSPRIATTTASAATAAAIGATPRAKGKAKH

SEQ ID NO: 3122 - protein, 428 aa, Homo sapiens
MAENDVDNELLDYEDDEVETAAGGDGAEAPAKKDVKGSYVSIHSSGFRDFLLKPELLRAIVDCGFEHPSEVQHECIPQAILGMDVLCQAKSGMGKTAVFVLATLQQLEPVTGQVSVLVMCHTRELAFQISKEYERFSKYMPNVKVAVFFGGLSIKKDEEVLKKNCPHIVVGTPGRILALARNKSLNLKHIKHFILDECDKMLEQLDMRRDVQEIFRMTPHEKQVMMFSATLSKEIRPVCRKFMQDPMEIFVDDETKLTLHGLQQYYVKLKDNEKNRKLFDLLDVLEFNQVVIFVKSVQRCIALAQLLVEQNFPAIAIHRGMPQEERLSRYQQFKDFQRRILVATNLFGRGMDIERVNIAFNYDMPEDSDTYLHRVARAGRFGTKGLAITFVSDENDAKILNDVQDRFEVNISELPDEIDISSYIEQTR

SEQ ID NO: 3123 - protein, 428 aa, Homo sapiens; identical to SEQ ID NO: 3122

SEQ ID NO: 3124 - protein, 550 aa, Homo sapiens
MPQRGHPSQEGLWALPSLPMAHGPKPETEGLLDLSFLTEEEQEAIAGVLQRDARLRQLEEGRVSKLRASVADPGQLKILTGDWFQEARSQRHHNAHFGSDLVRASMRRKKSTRGDQAPGHDREAEAAVKEKEEGPEPRLTIDEAPQERLRETEASDPEEASQAQEDPGQGDQQVCAEEADPELEPASGGEQEPRPQQAQTKAASQILENGEEAPGPDPSLDRMLSSSSSVSSLNSSTLSGSQMSLSGDAEAVQVRGSVHFALHYEPGAAELRVHVIQCQGLAAARRRRSDPYVKSYLLPDKQSKRKTAVKKRNLNPVFNETLRYSVPQAELQGRVLSLSVWHRESLGRNIFLGEVEVPLDTWDWGSEPTWLPLQPRVPPSPDDLPSRGLLALSLKYVPAGSEGAGLPPSGELHFWVKEARDLLPLRAGSLDTYVQCFVLPDDSQASRQRTRVVRRSLSPVFNHTMVYDGFGPADLRQACAELSLWDHGALANRQLGGTRLSLGTGSSYGLQVPWMDSTPEEKQLWQALLEQPCEWVDGLLPLRTNLAPRT

SEQ ID NO: 3125 - protein, 972 aa, Homo sapiens
MEAKEEEVIDGFAIASFSTLEALEKDMALKPHERKEKWERRLIKKPRESETCPPAEPSENRRPLEAGSPGQDLEPACDGARKVPLQPSKQMKVTVSKGGDRDSDDDSVLEATSSRDPLSDSSAHAVSGRGYSCDSESGPDDKASVGSEKLFAPGTDKGPALEKSEAKAGPVPKVSGLERSRELSAESFLPTASPAPHAAPCPGPPPGSRANPLVKKEPPAPHRHTPQPPPPQPRGLLPTHVPASLGAFAGHSQAAANGLHGLSRSSSAPLGLGKHVSLSPHGPGPHLSTSHLALRSQAQHQLHAAMFAAPPTLPPPPALPASSLVLPGHPADHELLRQELNTRFLVQSAERPGASLGPGALLRAEFHQHQHTHQHTHQHTHQHQHTFAPFPAGLPPTPPAAPPPFDKYAPKLDSPYFRHSSVSFFPSFPPAIPGLPTLLPHPGPFGSLQGAFQPKVSDPYRAVVKVSTCWEGPWQGRTLVPPGRPRGARDSRSLQKTWVGVAPAPLSASILSQKPGRWCAVHVQIAWQIYRHQQKIKEMQLDPHKLEVGAKLDLFGRPPAPGVFAGFHYPQDLARPLFPSTGAAHPASNPFGPSAHPGSFLPTGPLTDPFSRPSTFGGLGSLSSHAFGGLGSHALAPGGSIFAPKEGSSVHGLPSPHEAWNRLHRAPPSFPAPPPWPKSVDAERVSALTNHDREPDNGKEEQERDLLEKTRLLSRASPATPAGHPVSGLLLRAQSELGRSGAPAEREAEPRVKESRSPAKEEAAKMPARASPPHSKAAPGDVKVKEERGEDEASEPPAGGLHPAPLQLGLGRERLGAPGFAWEPFRGLELPRRAFPAAAPAPGSAALLEPPERPYRDREPHGYSPERLRGELERARAPHLPPAAPALDGALLPSLGALHFPRLSPAALHNGLLARTPPAAAALGAPPPLVTAAGPPTPPGPPRSRTTPLGGLGPGEARDYSPSRNPPEVEAR

SEQ ID NO: 3126 - protein, 972 aa, Homo sapiens; identical to SEQ ID NO: 3125

SEQ ID NO: 3127 - protein, 3056 aa, Homo sapiens
MSLVLNDLLICCRQLEHDRATERKKEVEKFKRLIRDPETIKHLDRHSDSKQGKYLNWDAVFRFLQKYIQKETECLRIAKPNVSASTQASRQKKMQEISSLVKYFIKCANRRAPRLKCQELLNYIMDTVKDSSNGAIYGADCSNILLKDILSVRKYWCEISQQQWLELFSVYFRLYLKPSQDVHRVLVARIIHAVTKGCCSQTDGLNSKFLDFFSKAIQCARQEKSSSGLNHILAALTIFLKTLAVNFRIRVCELGDEILPTLLYIWTQHRLNDSLKEVIIELFQLQIYIHHPKGAKTQEKGAYESTKWRSILYNLYDLLVNEISHIGSRGKYSSGFRNIAVKENLIELMADICHQVFNEDTRSLEISQSYTTTQRESSDYSVPCKRKKIELGWEVIKDHLQKSQNDFDLVPWLQIATQLISKYPASLPNCELSPLLMILSQLLPQQRHGERTPYVLRCLTEVALCQDKRSNLESSQKSDLLKLWNKIWCITFRGISSEQIQAENFGLLGAIIQGSLVEVDREFWKLFTGSACRPSCPAVCCLTLALTTSIVPGTVKMGIEQNMCEVNRSFSLKESIMKWLLFYQLEGDLENSTEVPPILHSNFPHLVLEKILVSLTMKNCKAAMNFFQSVPECEHHQKDKEELSFSEVEELFLQTTFDKMDFLTIVRECGIEKHQSSIGFSVHQNLKESLDRCLLGLSEQLLNNYSSEITNSETLVRCSRLLVGVLGCYCYMGVIAEEEAYKSELFQKAKSLMQCAGESITLFKNKTNEEFRIGSLRNMMQLCTRCLSNCTKKSPNKIASGFFLRLLTSKLMNDIADICKSLASFIKKPFDRGEVESMEDDTNGNLMEVEDQSSMNLFNDYPDSSVSDANEPGESQSTIGAINPLAEEYLSKQDLLFLDMLKFLCLCVTTAQTNTVSFRAADIRRKLLMLIDSSTLEPTKSLHLHMYLMLLKELPGEEYPLPMEDVLELLKPLSNVCSLYRRDQDVCKTILNHVLHVVKNLGQSNMDSENTRDAQGQFLTVIGAFWHLTKERKYIFSVRMALVNCLKTLLEADPYSKWAILNVMGKDFPVNEVFTQFLADNHHQVRMLAAESINRLFQDTKGDSSRLLKALPLKLQQTAFENAYLKAQEGMREMSHSAENPETLDEIYNRKSVLLTLIAVVLSCSPICEKQALFALCKSVKENGLEPHLVKKVLEKVSETFGYRRLEDFMASHLDYLVLEWLNLQDTEYNLSSFPFILLNYTNIEDFYRSCYKVLIPHLVIRSHFDEVKSIANQIQEDWKSLLTDCFPKILVNILPYFAYEGTRDSGMAQQRETATKVYDMLKSENLLGKQIDHLFISNLPEIVVELLMTLHEPANSSASQSTDLCDFSGDLDPAPNPPHFPSHVIKATFAYISNCHKTKLKSILEILSKSPDSYQKILLAICEQAAETNNVYKKHRILKIYHLFVSLLLKDIKSGLGGAWAFVLRDVIYTLIHYINQRPSCIMDVSLRSFSLCCDLLSQVCQTAVTYCKDALENHLHVIVGTLIPLVYEQVEVQKQVLDLLKYLVIDNKDNENLYITIKLLDPFPDHVVFKDLRITQQKIKYSRGPFSLLEEINHFLSVSVYDALPLTRLEGLKDLRRQLELHKDQMVDIMRASQDNPQDGIMVKLVVNLLQLSKMAINHTGEKEVLEAVGSCLGEVGPIDFSTIAIQHSKDASYTKALKLFEDKELQWTFIMLTYLNNTLVEDCVKVRSAAVTCLKNILATKTGHSFWEIYKMTTDPMLAYLQPFRTSRKKFLEVPRFDKENPFEGLDDINLWIPLSENHDIWIKTLTCAFLDSGGTKCEILQLLKPMCEVKTDFCQTVLPYLIHDILLQDTNESWRNLLSTHVQGFFTSCLRHFSQTSRSTTPANLDSESEHFFRCCLDKKSQRTMLAVVDYMRRQKRPSSGTIFNDAFWLDLNYLEVAKVAQSCAAHFTALLYAEIYADKKSMDDQEKRSLAFEEGSQSTTISSLSEKSKEETGISLQDLLLEIYRSIGEPDSLYGCGGGKMLQPITRLRTYEHEAMWGKALVTYDLETAIPSSTRQAGIIQALQNLGLCHILSVYLKGLDYENKDWCPELEELHYQAAWRNMQWDHCTSVSKEVEGTSYHESLYNALQSLRDREFSTFYESLKYARVKEVEEMCKRSLESVYSLYPTLSRLQAIGELESIGELFSRSVTHRQLSEVYIKWQKHSQLLKDSDFSFQEPIMALRTVILEILMEKEMDNSQRECIKDILTKHLVELSILARTFKNTQLPERAIFQIKQYNSVSCGVSEWQLEEAQVFWAKKEQSLALSILKQMIKKLDASCAANNPSLKLTYTECLRVCGNWLAETCLENPAVIMQTYLEKAVEVAGNYDGESSDELRNGKMKAFLSLARFSDTQYQRIENYMKSSEFENKQALLKRAKEEVGLLREHKIQTNRYTVKVQRELELDELALRALKEDRKRFLCKAVENYINCLLSGEEHDMWVFRLCSLWLENSGVSEVNGMMKRDGMKIPTYKFLPLMYQLAARMGTKMMGGLGFHEVLNNLISRISMDHPHHTLFIILALANANRDEFLTKPEVARRSRITKNVPKQSSQLDEDRTEAANRIICTIRSRRPQMVRSVEALCDAYIILANLDATQWKTQRKGINIPADQPITKLKNLEDVVVPTMEIKVDHTGEYGNLVTIQSFKAEFRLAGGVNLPKIIDCVGSDGKERRQLVKGRDDLRQDAVMQQVFQMCNTLLQRNTETRKRKLTICTYKVVPLSQRSGVLEWCTGTVPIGEFLVNNEDGAHKRYRPNDFSAFQCQKKMMEVQKKSFEEKYEVFMDVCQNFQPVFRYFCMEKFLDPAIWFEKRLAYTRSVATSSIVGYILGLGDRHVQNILINEQSAELVHIDLGVAFEQGKILPTPETVPFRLTRDIVDGMGITGVEGVFRRCCEKTMEVMRNSQETLLTIVEVLLYDPLFDWTMNPLKALYLQQRPEDETELHPTLNADDQECKRNLSDIDQSFNKVAERVLMRLQEKLKGVEEGTVLSVGGQVNLLIQQAIDPKNLSRLFPGWKAWV

SEQ ID NO: 3128 - protein, 1708 aa, Homo sapiens
MTLHEPANSSASQSTDLCDFSGDLDPAPNPPHFPSHVIKATFAYISNCHKTKLKSILEILSKSPDSYQKILLAICEQAAETNNVYKKHRILKIYHLFVSLLLKDIKSGLGGAWAFVLRDVIYTLIHYINQRPSCIMDVSLRSFSLCCDLLSQVCQTAVTYCKDALENHLHVIVGTLIPLVYEQVEVQKQVLDLLKYLVIDNKDNENLYITIKLLDPFPDHVVFKDLRITQQKIKYSRGPFSLLEEINHFLSVSVYDALPLTRLEGLKDLRRQLELHKDQMVDIMRASQDNPQDGIMVKLVVNLLQLSKMAINHTGEKEVLEAVGSCLGEVGPIDFSTIAIQHSKDASYTKALKLFEDKELQWTFIMLTYLNNTLVEDCVKVRSAAVTCLKNILATKTGHSFWEIYKMTTDPMLAYLQPFRTSRKKFLEVPRFDKENPFEGLDDINLWIPLSENHDIWIKTLTCAFLDSGGTKCEILQLLKPMCEVKTDFCQTVLPYLIHDILLQDTNESWRNLLSTHVQGFFTSCLRHFSQTSRSTTPANLDSESEHFFRCCLDKKSQRTMLAVVDYMRRQKRPSSGTIFNDAFWLDLNYLEVAKVAQSCAAHFTALLYAEIYADKKSMDDQEKRSLAFEEGSQSTTISSLSEKSKEETGISLQDLLLEIYRSIGEPDSLYGCGGGKMLQPITRLRTYEHEAMWGKALVTYDLETAIPSSTRQAGIIQALQNLGLCHILSVYLKGLDYENKDWCPELEELHYQAAWRNMQWDHCTSVSKEVEGTSYHESLYNALQSLRDREFSTFYESLKYARVKEVEEMCKRSLESVYSLYPTLSRLQAIGELESIGELFSRSVTHRQLSEVYIKWQKHSQLLKDSDFSFQEPIMALRTVILEILMEKEMDNSQRECIKDILTKHLVELSILARTFKNTQLPERAIFQIKQYNSVSCGVSEWQLEEAQVFWAKKEQSLALSILKQMIKKLDASCAANNPSLKLTYTECLRVCGNWLAETCLENPAVIMQTYLEKAVEVAGNYDGESSDELRNGKMKAFLSLARFSDTQYQRIENYMKSSEFENKQALLKRAKEEVGLLREHKIQTNRYTVKVQRELELDELALRALKEDRKRFLCKAVENYINCLLSGEEHDMWVFRLCSLWLENSGVSEVNGMMKRDGMKIPTYKFLPLMYQLAARMGTKMMGGLGFHEVLNNLISRISMDHPHHTLFIILALANANRDEFLTKPEVARRSRITKNVPKQSSQLDEDRTEAANRIICTIRSRRPQMVRSVEALCDAYIILANLDATQWKTQRKGINIPADQPITKLKNLEDVVVPTMEIKVDHTGEYGNLVTIQSFKAEFRLAGGVNLPKIIDCVGSDGKERRQLVKGRDDLRQDAVMQQVFQMCNTLLQRNTETRKRKLTICTYKVVPLSQRSGVLEWCTGTVPIGEFLVNNEDGAHKRYRPNDFSAFQCQKKMMEVQKKSFEEKYEVFMDVCQNFQPVFRYFCMEKFLDPAIWFEKRLAYTRSVATSSIVGYILGLGDRHVQNILINEQSAELVHIDLGVAFEQGKILPTPETVPFRLTRDIVDGMGITGVEGVFRRCCEKTMEVMRNSQETLLTIVEVLLYDPLFDWTMNPLKALYLQQRPEDETELHPTLNADDQECKRNLSDIDQSFNKVAERVLMRLQEKLKGVEEGTVLSVGGQVNLLIQQAIDPKNLSRLFPGWKAWV

SEQ ID NO: 3129 - protein, 426 aa, Homo sapiens
MAHLRGFANQHSRVDPEELFTKLDRIGKGSFGEVYKGIDNHTKEVVAIKIIDLEEAEDEIEDIQQEITVLSQCDSPYITRYFGSYLKSTKLWIIMEYLGGGSALDLLKPGPLEETYIATILREILKGLDYLHSERKIHRDIKAANVLLSEQGDVKLADFGVAGQLTDTQIKRNTFVGTPFWMAPEVIKQSAYDFKADIWSLGITAIELAKGEPPNSDLHPMRVLFLIPKNSPPTLEGQHSKPFKEFVEACLNKDPRFRPTAKELLKHKFITRYTKKTSFLTELIDRYKRWKSEGHGEESSSEDSDIDGEAEDGEQGPIWTFPPTIRPSPHSKLHKGTALHSSQKPAEPVKRQPRSQCLSTLVRPVFGELKEKHKQSGGSVGALEELENAFSLAEESCPGISDKLMVHLVERVQRFSHNRNHLTSTR

SEQ ID NO: 3130 - protein, 159 aa, Homo sapiens
MCVRRSLVGLTFCTCYLASYLTNKYVLSVLKFTYPTLFQGWQTLIGGLLLHVSWKLGWVEINSSSRSHVLVWLPASVLFVGIIYAGSRALSRLAIPVFLTLHNVAEVIICGYQKCFQKEKTSPAKICSALFLLAAAGCLPFNDSQGLIKFYRSPRNPVH

SEQ ID NO: 3131 - protein, 505 aa, Homo sapiens
MGLVSSKKPDKEKPIKEKDKGQWSPLKVSAQDKDAPPLPPLVVFNHLTPPPPDEHLDEDKHFVVALYDYTAMNDRDLQMLKGEKLQVLKGTGDWWLARSLVTGREGYVPSNFVARVESLEMERWFFRSQGRKEAERQLLAPINKAGSFLIRESETNKGAFSLSVKDVTTQGELIKHYKIRCLDEGGYYISPRITFPSLQALVQHYSKKGDGLCQRLTLPCVRPAPQNPWAQDEWEIPRQSLRLVRKLGSGQFGEVWMGYYKNNMKVAIKTLKEGTMSPEAFLGEANVMKALQHERLVRLYAVVTKEPIYIVTEYMARGCLLDFLKTDEGSRLSLPRLIDMSAQIAEGMAYIERMNSIHRDLRAANILVSEALCCKIADFGLARIIDSEYTAQEGAKFPIKWTAPEAIHFGVFTIKADVWSFGVLLMEVVTYGRVPYPGMSNPEVIRNLERGYRMPRPDTCPPELYRGVIAECWRSRPEERPTFEFLQSVLEDFYTATERQYELQP

SEQ ID NO: 3132 - protein, 159 aa, Homo sapiens
MRKNESYLNQPAPPIPIPTLSLMGGCREHFENHWKGRARWLMPVIPALWEAKAGRSPEVRSSKPAWPTWRNPIFTKNTKISQVLELFLNYQSLICALEKQKRQKGSLAIFCWSFQGGCVSKRPDVPSLKSQKPKRKRITGRKRLSKGFWSLLFSNLGRF

SEQ ID NO: 3133 - protein, 860 aa, Homo sapiens
MEQVAEGARVTAVPVSAADSTEELAEVEEGVGVVGEDNDAAARGAEAFGDSEEDGEDVFEVEKILDMKTEGGKVLYKVRWKGYTSDDDTWEPEIHLEDCKEVLLEFRKKIAENKAKAVRKDIQRLSLNNDIFEANSDSDQQSETKEDTSPKKKKKKLRQREEKSPDDLKKKKAKAGKLKDKSKPDLESSLESLVFDLRTKKRISEAKEELKESKKPKKDEVKETKELKKVKKGEIRDLKTKTREDPKENRKTKKEKFVESQVESESSVLNDSPFPEDDSEGLHSDSREEKQNTKSARERAGQDMGLEHGFEKPLDSAMSAEEDTDVRGRRKKKTPRKAEDTRENRKLENKNAFLEKKTVPKKQRNQDRSKSAAELEKLMPVSAQTPKGRRLSGEERGLWSTDSAEEDKETKRNESKEKYQKRHDSDKEEKGRKEPKGLKTLKEIRNAFDLFKLTPEEKNDVSENNRKREEIPLDFKTIDDHKTKENKQSLKERRNTRDETDTWAYIAAEGDQEVLDSVCQADENSDGRQQILSLGMDLQLEWMKLEDFQKHLDGKDENFAATDAIPSNVLRDAVKNGDYITVKVALNSNEEYNLDQEDSSGMTLVMLAAAGGQDDLLRLLITKGAKVNGRQKNGTTALIHAAEKNFLTTVAILLEAGAFVNVQQSNGETALMKACKRGNSDIVRLVIECGADCNILSKHQNSALHFAKQSNNVLVYDLLKNHLETLSRVAEETIKDYFEARLALLEPVFPIACHRLCEGPDFSTDFNYKPPQNIPEGSGILLFIFHANFLGKEVIARLCGPCSVQAVVLNDKFQLPVFLDSHFVYSFSPVAGPNKLFIRLTEAPSAKVKLLIGAYRVQLQ

SEQ ID NO: 3134 - protein, 543 aa, Homo sapiens
MATRRLGVGETLGALNAALGPGGPVWIKETRTRHLRSRDFLAPHRALQARFDDGQVPEHLLHALACLQGPGVAPVLRCAPTPAGLSLQLQRSAVFERVLSAVAAYATPASPASLGQRVLLHCPALRSSPCALRLSQLRTVLVADHLARALRAHGVCVRLVPAVRDPHMLTFLQQLRVDWPAASERASSHTLRSHALEELTSANDGRTLSPGILGRLCLKELVEEQGRTAGYDPNLDNCLVTEDLLSVLAELQEALWHWPEDSHPGLAGASDTGTGGCLVVHVVSCEEEFQQQKLDLLWQKLVDKAPLRQKHLICGPVKVAGAPGTLMTAPEYYEFRHTQVCKASALKHGGDLAQDPAWTEIFGVLSVATIKFEMLSTAPQSQLFLALADSSISTKGTKSGTFVMYNCARLATLFESYKCSMEQGLYPTFPPVSSLDFSLLHDEGEWLLLFNSILPFPDLLSRTAVLDCTAPGLHIAVRTEMICKFLVQLSMDFSSYYNRVHILGEPRPHLFGQMFVRLQLLRAVREVLHTGLAMLGLPPLSHI

SEQ ID NO: 3135 - protein, 376 aa, Homo sapiens
MLTFLQQLRVDWPAASERASSHTLRSHALEELTSANDGRTLSPGILGRLCLKELVEEQGRTAGYDPNLDNCLVTEDLLSVLAELQEALWHWPEDSHPGLAGASDTGTGGCLVVHVVSCEEEFQQQKLDLLWQKLVDKAPLRQKHLICGPVKVAGAPGTLMTAPEYYEFRHTQVCKASALKHGGDLAQDPAWTEIFGVLSVATIKFEMLSTAPQSQLFLALADSSISTKGTKSGTFVMYNCARLATLFESYKCSMEQGLYPTFPPVSSLDFSLLHDEGEWLLLFNSILPFPDLLSRTAVLDCTAPGLHIAVRTEMICKFLVQLSMDFSSYYNRVHILGEPRPHLFGQMFVRLQLLRAVREVLHTGLAMLGLPPLSHI

SEQ ID NO: 3136 - protein, 502 aa, Homo sapiens
MWTADEIAQLCYEHYGIRLPKKGKPEPNHEWTLLAAVVKIQSPADKACDTPDKPVQVTKEIVSMGTGTKCIGQSKMRKNGDILNDSHAEVIARRSFQRYLLHQLQLAATLKEDSIFVPGTQKGVWKLRRDLIFVFFSSHTPCGDASIIPMLEFEDQPCCPVFRNWANNSSVEASSNLEAPGNERKCEDPDSPVTKKMRLEPGTAAREVTNGAAHHQSFGKQKSGPISPGIHSCDLTVEGLATVTRIAPGSAKVTDVYRTGAKCVPGEAGDSGKPGAAFHQVGLLRVKPGRGDRTRSMSCSDKMARWNVLGCQGALLMHLLEEPIYLSAVVIGKCPYSQEAMQRALIGRCQNVSALPKGFGVQELKILQSDLLFEQSRSAVQAKRADSPGRLVPCGAAISWSAVPEQPLDVTANGFPQGTTKKTIGSLQARSQISKVELFRSFQKLLSRIARDKWPHSLRVQKLDTYQEYKEAASSYQEAWSTLRKQVFGSWIRNPPDYHQFK

SEQ ID NO: 3137 - protein, 105 aa, Homo sapiens
MGAQDRPQCHFDIEINREPVGRIMFQLFSDICPKTCKNFLCLCSGEKGLGKTTGKKLCYKGSTFHRVVKNFMIQGGDFSEGNGKGGESIYGGYFKENVVFCKMKR

SEQ ID NO: 3138 - protein, 1462 aa, Homo sapiens
MGAQDRPQCHFDIEINREPVGRIMFQLFSDICPKTCKNFLCLCSGEKGLGKTTGKKLCYKGSTFHRVVKNFMIQGGDFSEGNGKGGESIYGGYFKDENFILKHDRAFLLSMANRGKHTNGSQFFITTKPAPHLDGVHVVFGLVISGFEVIEQIENLKTDAASRPYADVRVIDCGVLATKSIKDVFEKKRKKPTHSEGSDSSSNSSSSSESSSESELEHERSRRRKHKRRPKVKRSKKRRKEASSSEEPRNKHAMNPKGHSERSDTNEKRSVDSSAKREKPVVRPEEIPPVPENRFLLRRDMPVVTAEPEPKIPDVAPIVSDQKPSVSKSGRKIKGRGTIRYHTPPRSRSCSESDDDDSSETPPHWKEEMQRLRAYRPPSGEKWSKGDKLSDPCSSRWDERSLSQRSRSWSYNGYYSDLSTARHSGHHKKRRKEKKVKHKKKGKKQKHCRRHKQTKKRRILIPSDIESSKSSTRRMKSSCDRERSSRSSSLSSHHSSKRDWSKSDKDVQSSLTHSSRDSYRSKSHSQSYSRGSSRSRTASKSSSHSRSRSKSRSSSKSGHRKRASKSPRKTASQLSENKPVKTEPLRATMAQNENVVVQPVVAENIPVIPLSDSPPPSRWKPGQKPWKPSYERIQEMKAKTTHLLPIQSTYSLANIKETGSSSSYHKREKNSESDQSTYSKYSDRSSESSPRSRSRSSRSRSYSRSYTRSRSLASSHSRSRSPSSRSHSRNKYSDHSQCSRSSSYTSISSDDGRRAKRRLRSSGKKNSVSHKKHSSSSEKTLHSKYVKGRDRSSCVRKYSESRSSLDYSSDSEQSSVQATQSAQEKEKQGQMERTHNKQEKNRGEEKSKSERECPHSKKRTLKENLSDHLRNGSKPKRKNYAGSKWDSESNSERDVTKNSKNDSHPSSDKEEGEATSDSESEVSEIHIKVKPTTKSSTNTSLPDDNGAWKSSKQRTSTSDSEGSCSNSENNRGKPQKHKHGSKENLKREHTKKVKEKLKGKKDKKHKAPKRKQAFHWQPPLEFGEEEEEEIDDKQVTQESKEKKVSENNETIKDNILKTEKSSEEDLSGKHDTVTVSSDLDQFTKDDSKLSISPTALNTEENVACLQNIQHVEESVPNGVEDVLQTDDNMEICTPDRSSPAKVEETSPLGNARLDTPDINIVLKQDMATEHPQAEVVKQESSMSESKVLGEVGKQDSSSASLASAGESTGKKEVAEKSQINLIDKKWKPLQGVGNLAAPNAATSSAVEVKVLTTVPEMKPQGLRIEIKSKNKVRPGSLFDEVRKTARLNRRPRNQESSSDEQTPSRDDDSQSRSPSRSRSKSETKSRHRTRSVSYSHSRSRSRSSTSSYRSRSYSRSRSRGWYSRGRTRSRSSSYRSYKSHRTSSRSRSRSSSYDPHSRSRSYTYDSYYSRSRSRSRSQRSDSYHRGRSYNRRSRSCRSYGSDSESDRSYSHHRSPSESSRYS

SEQ ID NO: 3139 - protein, 617 aa, Homo sapiens
MLVPLAKLSCLAYQCFHALKIKKNYLPLCAIRWSSTSTVPRITTHYTIYPRDKDKRWEGVNMERFAEEADVVIVGAGPAGLSAAVRLKQLAVAHEKDIRVCLVEKAAQIGAHTLSGACLDPGAFKELFPDWKEKGAPLNTPVTEDRFGILTEKYRIPVPILPGLPMNNHGNYIVRLGHLVSWMGEQAEALGVEVYPGYAAAEVLFHDDGSVKGIATNDVGIQKDGAPKATFERGLELHAKVTIFAEGCHGHLAKQLYKKFDLRANCEPQTYGIGLKELWVIDEKNWKPGRVDHTVGWPLDRHTYGGSFLYHLNEGEPLVALGLVVGLDYQNPYLSPFREFQRWKHHPSIRPTLEGGKRIAYGARALNEGGFQSIPKLTFPGGLLIGCSPGFMNVPKIKGTHTAMKSGILAAESIFNQLTSENLQSKTIGLHVTEYEDNLKNSWVWKELYSVRNIRPSCHGVLGVYGGMIYTGIFYWILRGMEPWTLKHKGSDFERLKPAKDCTPIEYPKPDGQISFDLLSSVALSGTNHEHDQPAHLTLRDDSIPVNRNLSIYDGPEQRFCPAGVYEFVPVEQGDGFRLQINAQNCVHCKTCDIKDPSQNINWVVPEGGGGPAYNGM

SEQ ID NO: 3140 - protein, 1375 aa, Homo sapiens
MAGGAWGRLACYLEFLKKEELKEFQLLLANKAHSRSSSGETPAQPEKTSGMEVASYLVAQYGEQRAWDLALHTWEQMGLRSLCAQAQEGAGHSPSFPYSPSEPHLGSPSQPTSTAVLMPWIHELPAGCTQGSERRVLRQLPDTSGRRWREISASLLYQALPSSPDHESPSQESPNAPTSTAVLGSWGSPPQPSLAPREQEAPGTQWPLDETSGIYYTEIREREREKSEKGRPPWAAVVGTPPQAHTSLQPHHHPWEPSVRESLCSTWPWKNEDFNQKFTQLLLLQRPHPRSQDPLVKRSWPDYVEENRGHLIEIRDLFGPGLDTQEPRIVILQGAAGIGKSTLARQVKEAWGRGQLYGDRFQHVFYFSCRELAQSKVVSLAELIGKDGTATPAPIRQILSRPERLLFILDGVDEPGWVLQEPSSELCLHWSQPQPADALLGSLLGKTILPEASFLITARTTALQNLIPSLEQARWVEVLGFSESSRKEYFYRYFTDERQAIRAFRLVKSNKELWALCLVPWVSWLACTCLMQQMKRKEKLTLTSKTTTTLCLHYLAQALQAQPLGPQLRDLCSLAAEGIWQKKTLFSPDDLRKHGLDGAIISTFLKMGILQEHPIPLSYSFIHLCFQEFFAAMSYVLEDEKGRGKHSNCIIDLEKTLEAYGIHGLFGASTTRFLLGLLSDEGEREMENIFHCRLSQGRNLMQWVPSLQLLLQPHSLESLHCLYETRNKTFLTQVMAHFEEMGMCVETDMELLVCTFCIKFSRHVKKLQLIEGRQHRSTWSPTMVVLFRWVPVTDAYWQILFSVLKVTRNLKELDLSGNSLSHSAVKSLCKTLRRPRCLLETLRLAGCGLTAEDCKDLAFGLRANQTLTELDLSFNVLTDAGAKHLCQRLRQPSCKLQRLQLVSCGLTSDCCQDLASVLSASPSLKELDLQQNNLDDVGVRLLCEGLRHPACKLIRLGLDQTTLSDEMRQELRALEQEKPQLLIFSRRKPSVMTPTEGLDTGEMSNSTSSLKRQRLGSERAASHVAQANLKLLDVSKIFPIAEIAGKSHEESSPEVVPVELLCVPSPASQGDLHTKPLGTDDDFWGPTGPVATEVVDKEKNLYRVHFPVAGSYRWPNTGLCFVMREAVTVEIEFCVWDQFLGEINPQHSWMVAGPLLDIKAEPGAVEAVHLPHFVALQGGHVDTSLFQMAHFKEEGMLLEKPARVELHHIVLENPSFSPLGVLLKMIHNALRFIPVTSVVLLYHRVHPEEVTFHLYLIPSDCSIRKAIDDLEMKFQFVRIHKPPPLTPLYMGCRYTVSGSGSGMLEILPKELELCYRSPGEDQLFSEFYVGHLGSGIRLQVKDKKDETLVWEALVKPGRNTSQPWNLRCNRDARRY

SEQ ID NO: 3141 - protein, 1429 aa, Homo sapiens
MAGGAWGRLACYLEFLKKEELKEFQLLLANKAHSRSSSGETPAQPEKTSGMEVASYLVAQYGEQRAWDLALHTWEQMGLRSLCAQAQEGAGHSPSFPYSPSEPHLGSPSQPTSTAVLMPWIHELPAGCTQGSERRVLRQLPDTSGRRWREISASLLYQALPSSPDHESPSQESPNAPTSTAVLGSWGSPPQPSLAPREQEAPGTQWPLDETSGIYYTEIREREREKSEKGRPPWAAVVGTPPQAHTSLQPHHHPWEPSVRESLCSTWPWKNEDFNQKFTQLLLLQRPHPRSQDPLVKRSWPDYVEENRGHLIEIRDLFGPGLDTQEPRIVILQGAAGIGKSTLARQVKEAWGRGQLYGDRFQHVFYFSCRELAQSKVVSLAELIGKDGTATPAPIRQILSRPERLLFILDGVDEPGWVLQEPSSELCLHWSQPQPADALLGSLLGKTILPEASFLITARTTALQNLIPSLEQARWVEVLGFSESSRKEYFYRYFTDERQAIRAFRLVKSNKELWALCLVPWVSWLACTCLMQQMKRKEKLTLTSKTTTTLCLHYLAQALQAQPLGPQLRDLCSLAAEGIWQKKTLFSPDDLRKHGLDGAIISTFLKMGILQEHPIPLSYSFIHLCFQEFFAAMSYVLEDEKGRGKHSNCIIDLEKTLEAYGIHGLFGASTTRFLLGLLSDEGEREMENIFHCRLSQGRNLMQWVPSLQLLLQPHSLESLHCLYETRNKTFLTQVMAHFEEMGMCVETDMELLVCTFCIKFSRHVKKLQLIEGRQHRSTWSPTMVVLFRWVPVTDAYWQILFSVLKVTRNLKELDLSGNSLSHSAVKSLCKTLRRPRCLLETLRLAGCGLTAEDCKDLAFGLRANQTLTELDLSFNVLTDAGAKHLCQRLRQPSCKLQRLQLVSCGLTSDCCQDLASVLSASPSLKELDLQQNNLDDVGVRLLCEGLRHPACKLIRLGLDQTTLSDEMRQELRALEQEKPQLLIFSRRKPSVMTPTEGLDTGEMSNSTSSLKRQRLGSERAASHVAQANLKLLDVSKIFPIAEIAEESSPEVVPVELLCVPSPASQGDLHTKPLGTDDDFWGPTGPVATEVVDKEKNLYRVHFPVAGSYRWPNTGLCFVMREAVTVEIEFCVWDQFLGEINPQHSWMVAGPLLDIKAEPGAVEAVHLPHFVALQGGHVDTSLFQMAHFKEEGMLLEKPARVELHHIVLENPSFSPLGVLLKMIHNALRFIPVTSVVLLYHRVHPEEVTFHLYLIPSDCSIRKELELCYRSPGEDQLFSEFYVGHLGSGIRLQVKDKKDETLVWEALVKPGDLMPATTLIPPARIAVPSPLDAPQLLHFVDQYREQLIARVTSVEVVLDKLHGQVLSQEQYERVLAENTRPSQMRKLFSLSQSWDRKCKDGLYQALKETHPHLIMELWEKGSKKGLLPLSS

SEQ ID NO: 3142 - protein, 1473 aa, Homo sapiens
MAGGAWGRLACYLEFLKKEELKEFQLLLANKAHSRSSSGETPAQPEKTSGMEVASYLVAQYGEQRAWDLALHTWEQMGLRSLCAQAQEGAGHSPSFPYSPSEPHLGSPSQPTSTAVLMPWIHELPAGCTQGSERRVLRQLPDTSGRRWREISASLLYQALPSSPDHESPSQESPNAPTSTAVLGSWGSPPQPSLAPREQEAPGTQWPLDETSGIYYTEIREREREKSEKGRPPWAAVVGTPPQAHTSLQPHHHPWEPSVRESLCSTWPWKNEDFNQKFTQLLLLQRPHPRSQDPLVKRSWPDYVEENRGHLIEIRDLFGPGLDTQEPRIVILQGAAGIGKSTLARQVKEAWGRGQLYGDRFQHVFYFSCRELAQSKVVSLAELIGKDGTATPAPIRQILSRPERLLFILDGVDEPGWVLQEPSSELCLHWSQPQPADALLGSLLGKTILPEASFLITARTTALQNLIPSLEQARWVEVLGFSESSRKEYFYRYFTDERQAIRAFRLVKSNKELWALCLVPWVSWLACTCLMQQMKRKEKLTLTSKTTTTLCLHYLAQALQAQPLGPQLRDLCSLAAEGIWQKKTLFSPDDLRKHGLDGAIISTFLKMGILQEHPIPLSYSFIHLCFQEFFAAMSYVLEDEKGRGKHSNCIIDLEKTLEAYGIHGLFGASTTRFLLGLLSDEGEREMENIFHCRLSQGRNLMQWVPSLQLLLQPHSLESLHCLYETRNKTFLTQVMAHFEEMGMCVETDMELLVCTFCIKFSRHVKKLQLIEGRQHRSTWSPTMVVLFRWVPVTDAYWQILFSVLKVTRNLKELDLSGNSLSHSAVKSLCKTLRRPRCLLETLRLAGCGLTAEDCKDLAFGLRANQTLTELDLSFNVLTDAGAKHLCQRLRQPSCKLQRLQLVSCGLTSDCCQDLASVLSASPSLKELDLQQNNLDDVGVRLLCEGLRHPACKLIRLGLDQTTLSDEMRQELRALEQEKPQLLIFSRRKPSVMTPTEGLDTGEMSNSTSSLKRQRLGSERAASHVAQANLKLLDVSKIFPIAEIAEESSPEVVPVELLCVPSPASQGDLHTKPLGTDDDFWGPTGPVATEVVDKEKNLYRVHFPVAGSYRWPNTGLCFVMREAVTVEIEFCVWDQFLGEINPQHSWMVAGPLLDIKAEPGAVEAVHLPHFVALQGGHVDTSLFQMAHFKEEGMLLEKPARVELHHIVLENPSFSPLGVLLKMIHNALRFIPVTSVVLLYHRVHPEEVTFHLYLIPSDCSIRKAIDDLEMKFQFVRIHKPPPLTPLYMGCRYTVSGSGSGMLEILPKELELCYRSPGEDQLFSEFYVGHLGSGIRLQVKDKKDETLVWEALVKPGDLMPATTLIPPARIAVPSPLDAPQLLHFVDQYREQLIARVTSVEVVLDKLHGQVLSQEQYERVLAENTRPSQMRKLFSLSQSWDRKCKDGLYQALKETHPHLIMELWEKGSKKGLLPLSS

SEQ ID NO: 3143 - protein, 1443 aa, Homo sapiens
MAGGAWGRLACYLEFLKKEELKEFQLLLANKAHSRSSSGETPAQPEKTSGMEVASYLVAQYGEQRAWDLALHTWEQMGLRSLCAQAQEGAGHSPSFPYSPSEPHLGSPSQPTSTAVLMPWIHELPAGCTQGSERRVLRQLPDTSGRRWREISASLLYQALPSSPDHESPSQESPNAPTSTAVLGSWGSPPQPSLAPREQEAPGTQWPLDETSGIYYTEIREREREKSEKGRPPWAAVVGTPPQAHTSLQPHHHPWEPSVRESLCSTWPWKNEDFNQKFTQLLLLQRPHPRSQDPLVKRSWPDYVEENRGHLIEIRDLFGPGLDTQEPRIVILQGAAGIGKSTLARQVKEAWGRGQLYGDRFQHVFYFSCRELAQSKVVSLAELIGKDGTATPAPIRQILSRPERLLFILDGVDEPGWVLQEPSSELCLHWSQPQPADALLGSLLGKTILPEASFLITARTTALQNLIPSLEQARWVEVLGFSESSRKEYFYRYFTDERQAIRAFRLVKSNKELWALCLVPWVSWLACTCLMQQMKRKEKLTLTSKTTTTLCLHYLAQALQAQPLGPQLRDLCSLAAEGIWQKKTLFSPDDLRKHGLDGAIISTFLKMGILQEHPIPLSYSFIHLCFQEFFAAMSYVLEDEKGRGKHSNCIIDLEKTLEAYGIHGLFGASTTRFLLGLLSDEGEREMENIFHCRLSQGRNLMQWVPSLQLLLQPHSLESLHCLYETRNKTFLTQVMAHFEEMGMCVETDMELLVCTFCIKFSRHVKKLQLIEGRQHRSTWSPTMVVLFRWVPVTDAYWQILFSVLKVTRNLKELDLSGNSLSHSAVKSLCKTLRRPRCLLETLRLAGCGLTAEDCKDLAFGLRANQTLTELDLSFNVLTDAGAKHLCQRLRQPSCKLQRLQLVSCGLTSDCCQDLASVLSASPSLKELDLQQNNLDDVGVRLLCEGLRHPACKLIRLGKPSVMTPTEGLDTGEMSNSTSSLKRQRLGSERAASHVAQANLKLLDVSKIFPIAEIAEESSPEVVPVELLCVPSPASQGDLHTKPLGTDDDFWGPTGPVATEVVDKEKNLYRVHFPVAGSYRWPNTGLCFVMREAVTVEIEFCVWDQFLGEINPQHSWMVAGPLLDIKAEPGAVEAVHLPHFVALQGGHVDTSLFQMAHFKEEGMLLEKPARVELHHIVLENPSFSPLGVLLKMIHNALRFIPVTSVVLLYHRVHPEEVTFHLYLIPSDCSIRKAIDDLEMKFQFVRIHKPPPLTPLYMGCRYTVSGSGSGMLEILPKELELCYRSPGEDQLFSEFYVGHLGSGIRLQVKDKKDETLVWEALVKPGDLMPATTLIPPARIAVPSPLDAPQLLHFVDQYREQLIARVTSVEVVLDKLHGQVLSQEQYERVLAENTRPSQMRKLFSLSQSWDRKCKDGLYQALKETHPHLIMELWEKGSKKGLLPLSS

SEQ ID NO: 3144 - protein, 1399 aa, Homo sapiens
MAGGAWGRLACYLEFLKKEELKEFQLLLANKAHSRSSSGETPAQPEKTSGMEVASYLVAQYGEQRAWDLALHTWEQMGLRSLCAQAQEGAGHSPSFPYSPSEPHLGSPSQPTSTAVLMPWIHELPAGCTQGSERRVLRQLPDTSGRRWREISASLLYQALPSSPDHESPSQESPNAPTSTAVLGSWGSPPQPSLAPREQEAPGTQWPLDETSGIYYTEIREREREKSEKGRPPWAAVVGTPPQAHTSLQPHHHPWEPSVRESLCSTWPWKNEDFNQKFTQLLLLQRPHPRSQDPLVKRSWPDYVEENRGHLIEIRDLFGPGLDTQEPRIVILQGAAGIGKSTLARQVKEAWGRGQLYGDRFQHVFYFSCRELAQSKVVSLAELIGKDGTATPAPIRQILSRPERLLFILDGVDEPGWVLQEPSSELCLHWSQPQPADALLGSLLGKTILPEASFLITARTTALQNLIPSLEQARWVEVLGFSESSRKEYFYRYFTDERQAIRAFRLVKSNKELWALCLVPWVSWLACTCLMQQMKRKEKLTLTSKTTTTLCLHYLAQALQAQPLGPQLRDLCSLAAEGIWQKKTLFSPDDLRKHGLDGAIISTFLKMGILQEHPIPLSYSFIHLCFQEFFAAMSYVLEDEKGRGKHSNCIIDLEKTLEAYGIHGLFGASTTRFLLGLLSDEGEREMENIFHCRLSQGRNLMQWVPSLQLLLQPHSLESLHCLYETRNKTFLTQVMAHFEEMGMCVETDMELLVCTFCIKFSRHVKKLQLIEGRQHRSTWSPTMVVLFRWVPVTDAYWQILFSVLKVTRNLKELDLSGNSLSHSAVKSLCKTLRRPRCLLETLRLAGCGLTAEDCKDLAFGLRANQTLTELDLSFNVLTDAGAKHLCQRLRQPSCKLQRLQLVSCGLTSDCCQDLASVLSASPSLKELDLQQNNLDDVGVRLLCEGLRHPACKLIRLGKPSVMTPTEGLDTGEMSNSTSSLKRQRLGSERAASHVAQANLKLLDVSKIFPIAEIAEESSPEVVPVELLCVPSPASQGDLHTKPLGTDDDFWGPTGPVATEVVDKEKNLYRVHFPVAGSYRWPNTGLCFVMREAVTVEIEFCVWDQFLGEINPQHSWMVAGPLLDIKAEPGAVEAVHLPHFVALQGGHVDTSLFQMAHFKEEGMLLEKPARVELHHIVLENPSFSPLGVLLKMIHNALRFIPVTSVVLLYHRVHPEEVTFHLYLIPSDCSIRKELELCYRSPGEDQLFSEFYVGHLGSGIRLQVKDKKDETLVWEALVKPGDLMPATTLIPPARIAVPSPLDAPQLLHFVDQYREQLIARVTSVEVVLDKLHGQVLSQEQYERVLAENTRPSQMRKLFSLSQSWDRKCKDGLYQALKETHPHLIMELWEKGSKKGLLPLSS

SEQ ID NO: 3145 - protein, 257 aa, Homo sapiens
MVGAGISTPSGIPDFRSPGSGLYSNLQQYDLPYPEAIFELPFFFHNPKPFFTLAKELYPGNYKPNVTHYFLRLLHDKGLLLRLYTQNIDGLERVSGIPASKLVEAHGTFASATCTVCQRPFPGEDIRADVMADRVPRCPVCTGVVKPDIVFFGEPLPQRFLLHVVDFPMADLLLILGTSLEVEPFASLTEAVRSSVPRLLINRDLVGPLAWHPRSRDVAQLGDVVHGVESLVELLGWTEEMRDLVQRETGKLDGPDK

SEQ ID NO: 3146 - protein, 399 aa, Homo sapiens
MAFWGWRAAAALRLWGRVVERVEAGGGVGPFQACGCRLVLGGRDDVSAGLRGSHGARGEPLDPARPLQRPPRPEVPRAFRRQPRAAAPSFFFSSIKGGRRSISFSVGASSVVGSGGSSDKGKLSLQDVAELIRARACQRVVVMVGAGISTPSGIPDFRSPGSGLYSNLQQYDLPYPEAIFELPFFFHNPKPFFTLAKELYPGNYKPNVTHYFLRLLHDKGLLLRLYTQNIDGLERVSGIPASKLVEAHGTFASATCTVCQRPFPGEDIRADVMADRVPRCPVCTGVVKPDIVFFGEPLPQRFLLHVVDFPMADLLLILGTSLEVEPFASLTEAVRSSVPRLLINRDLVGPLAWHPRSRDVAQLGDVVHGVESLVELLGWTEEMRDLVQRETGKLDGPDK

SEQ ID NO: 3147 - protein, 538 aa, Homo sapiens
MAGPPALPPPETAAAATTAAAASSSAASPHYQEWILDTIDSLRSRKARPDLERICRMVRRRHGPEPERTRAELEKLIQQRAVLRVSYKGSISYRNAARVQPPRRGATPPAPPRAPRGAPAAAAAAAPPPTPAPPPPPAPVAAAAPARAPRAAAAAATAPPSPGPAQPGPRAQRAAPLAAPPPAPAAPPAVAPPAGPRRAPPPAVAAREPPLPPPPQPPAPPQQQQPPPPQPQPPPEGGAVRAGGAARPVSLREVVRYLGGSGGAGGRLTRGRVQGLLEEEAAARGRLERTRLGALALPRGDRPGRAPPAASARPSRSKRGGEERVLEKEEEEDDDEDEDEEDDVSEGSEVPESDRPAGAQHHQLNGERGPQSAKERVKEWTPCGPHQGQDEGRGPAPGSGTRQVFSMAAMNKEGGTASVATGPDSPSPVPLPPGKPALPGADGTPFGCPPGRKEKPSDPVEWTVMDVVEYFTEAGFPEQATAFQEQEIDGKSLLLMQRTDVLTGLSIRLGPALKIYEHHIKVLQQGHFEDDDPDGFLG

SEQ ID NO: 3148 - protein, 204 aa, Homo sapiens
MALSDADVQKQAEEEFNIEKGRLVQTQRLKIMEYYEKKEKQIEQQKKIQMSNLMNQARLKVLRARDDLITDLLNEAKQRLSKVVKDTTRYQVLLDGLVLQGLYQLLEPRMIVRCRKQDFPLVKAAVQKAIPMYKIATKNDVDVQIDQESYLPEDIAGGVEIYNGDRKIKVSNTLESRLDLIAQQMMPEVRGALFGANANRKFLD

SEQ ID NO: 3149 - protein, 196 aa, Homo sapiens
MALSDADVQKQIKHMMAFIEQEANEKAEEIDAKAEEEFNIEKGRLVQTQRLKIMEYYEKKEKQIEQQKKIQMSNLMNQARLKVLRARDDLITGLYQLLEPRMIVRCRKQDFPLVKAAVQKAIPMYKIATKNDVDVQIDQESYLPEDIAGGVEIYNGDRKIKVSNTLESRLDLIAQQMMPEVRGALFGANANRKFLD

SEQ ID NO: 3150 - protein, 226 aa, Homo sapiens
MALSDADVQKQIKHMMAFIEQEANEKAEEIDAKAEEEFNIEKGRLVQTQRLKIMEYYEKKEKQIEQQKKIQMSNLMNQARLKVLRARDDLITDLLNEAKQRLSKVVKDTTRYQVLLDGLVLQGLYQLLEPRMIVRCRKQDFPLVKAAVQKAIPMYKIATKNDVDVQIDQESYLPEDIAGGVEIYNGDRKIKVSNTLESRLDLIAQQMMPEVRGALFGANANRKFLD

SEQ ID NO: 3151 - protein, 519 aa, Homo sapiens
MAEERVATRTQFPVSTESQKPRQKKAPEFPILEKQNWLIHLHYIRKDYEACKAVIKEQLQETQGLCEYAIYVQALIFRLEGNIQESLELFQTCAVLSPQSADNLKQVARSLFLLGKHKAAIEVYNEAAKLNQKDWEISHNLGVCYIYLKQFNKAQDQLHNALNLNRHDLTYIMLGKIHLLEGDLDKAIEVYKKAVEFSPENTELLTTLGLLYLQLGIYQKAFEHLGNALTYDPTNYKAILAAGSMMQTHGDFDVALTKYRVVACAVPESPPLWNNIGMCFFGKKKYVAAISCLKRANYLAPFDWKILYNLGLVHLTMQQYASAFHFLSAAINFQPKMGELYMLLAVALTNLEDIENAKRAYAEAVHLDKCNPLVNLNYAVLLYNQGEKKNALAQYQEMEKKVSLLKDNSSLEFDSEMVEMAQKLGAALQVGEALVWTKPVKDPKSKHQTTSTSKPASFQQPLGSNQALGQAMSSAAAYRTLPSGAGGTSQFTKPPSLPLEPEPAVESSPTETSEQIREK

SEQ ID NO: 3152 - protein, 100 aa, Homo sapiens
MRSQVSALLTAAARGSIADPEAVAVVRGGAVAGALAQPTQGLLRVREAGRSGGREVPGSGSRWTLQASGEGRHKTSVSTCEVCIGLIQKVRTTPSGKASR

SEQ ID NO: 3153 - protein, 575 aa, Homo sapiens
MDFPTISRSPSGPPAMDLEGPRDILVPSEDLTPDSQWDPMPGGPGSLSRMELDESSLQELVQQFEALPGDLVGPSPGGAPCPLHIATGHGLASQEIADAHGLLSAEAGRDDLLGLLHCEECPPSQTGPEEPLEPAPRLLQPPEDPDEDSDSPEWVEGASAEQEGSRSSSSSPEPWLETVPLVTPEEPPAGAQSPETLASYPAPQEVPGPCDHEDLLDGVIFGARYLGSTQLVSERNPPTSTRMAQAREAMDRVKAPDGETQPMTEVDLFVSTKRIKVLTADSQEAMMDHALHTISYTADIGCVLVLMARRRLARRPAPQDHGRRLYKMLCHVFYAEDAQLIAQAIGQAFAAAYSQFLRESGIDPSQVGVHPSPGACHLHNGDLDHFSNSDNCREVHLEKRRGEGLGVALVESGWGSLLPTAVIANLLHGGPAERSGALSIGDRLTAINGTSLVGLPLAACQAAVRETKSQTSVTLSIVHCPPVTTAIIHRPHAREQLGFCVEDGIICSLLRGGIAERGGIRVGHRIIEINGQSVVATPHARIIELLTEAYGEVHIKTMPAATYRLLTGQEQPVYL

SEQ ID NO: 3154 - protein, 165 aa, Homo sapiens
MAGTALKRLMAEYKQLTLNPPEGIVAGPMNEENFFEWEALIMGPEDTCFEFGVFPAILSFPLDYPLSPPKMRFTCEMFHPNIYPDGRVCISILHAPGDDPMGYESSAERWSPVQSVEKILLSVVSMLAEPNDESGANVDASKMWRDDREQFYKIAKQIVQKSLGL

SEQ ID NO: 3155 - protein, 137 aa, Homo sapiens
MNEENFFEWEALIMGPEDTCFEFGVFPAILSFPLDYPLSPPKMRFTCEMFHPNIYPDGRVCISILHAPGDDPMGYESSAERWSPVQSVEKILLSVVSMLAEPNDESGANVDASKMWRDDREQFYKIAKQIVQKSLGL

SEQ ID NO: 3156 - protein, 416 aa, Homo sapiens
MQTSEREGSGPELSPSVMPEAPLESPPFPTKSPAFDLFNLVLSYKRLEIYLEPLKDAGDGVRYLLRWQMPLCSLLTCLGLNVLFLTLNEGAWYSVGALMISVPALLGYLQEVCRARLPDSELMRRKYHSVRQEDLQRGRLSRPEAVAEVKSFLIQLEAFLSRLCCTCEAAYRVLHWENPVVSSQFYGALLGTVCMLYLLPLCWVLTLLNSTLFLGNVEFFRVVSEYRASLQQRMNPKQEEHAFESPPPPDVGGKDGLMDSTPALTPTESLSSQDLTPGSVEEAEEAEPDEEFKDAIEETHLVVLEDDEGAPCPAEDELALQDNGFLSKNEVLRSKVSRLTERLRKRYPTNNFGNCTGCSATFSVLKKRRSCSNCGNSFCSRCCSFKVPKSSMGATAPEAQRETVFVCASCNQTLSK

SEQ ID NO: 3157 - protein, 404 aa, Homo sapiens
MQTSEREGSGPELSPSVMPEAPLESPPFPTKSPAFDLFNLVLSYKRLEIYLEPLKDAGDGVRYLLRWQMPLCSLLTCLGLNVLFLTLNEGAWYSVGALMISVPALLGYLQEVCRARLPDSELMRRKYHSVRQEDLQRGRLSRPEAVAEVKSFLIQLEAFLSRLCCTCEAAYRVLHWENPVVSSQFYGALLGTVCMLYLLPLCWVLTLLNSTLFLGNVEFFRVVSEYRASLQQRMNPKQEEHAFESPPPPDVGGKDGLMDSTPALTPTEDLTPGSVEEAEEAEPDEEFKDAIEEDDEGAPCPAEDELALQDNGFLSKNEVLRSKVSRLTERLRKRYPTNNFGNCTGCSATFSVLKKRRSCSNCGNSFCSRCCSFKVPKSSMGATAPEAQRETVFVCASCNQTLSK

SEQ ID NO: 3158 - protein, 411 aa, Homo sapiens
MQTSEREGSGPELSPSVMPEAPLESPPFPTKSPAFDLFNLVLSYKRLEIYLEPLKDAGDGVRYLLRWQMPLCSLLTCLGLNVLFLTLNEGAWYSVGALMISVPALLGYLQEVCRARLPDSELMRRKYHSVRQEDLQRGRLSRPEAVAEVKSFLIQLEAFLSRLCCTCEAAYRVLHWENPVVSSQFYGALLGTVCMLYLLPLCWVLTLLNSTLFLGNVEFFRVVSEYRASLQQRMNPKQEEHAFESPPPPDVGGKDGLMDSTPALTPTEDLTPGSVEEAEEAEPDEEFKDAIEETHLVVLEDDEGAPCPAEDELALQDNGFLSKNEVLRSKVSRLTERLRKRYPTNNFGNCTGCSATFSVLKKRRSCSNCGNSFCSRCCSFKVPKSSMGATAPEAQRETVFVCASCNQTLSK

SEQ ID NO: 3159 - protein, 668 aa, Homo sapiens
MWLFFGITGLLTAALSGHPSPAPPDQLNTSSAESELWEPGERLPVRLTNGSSSCSGTVEVRLEASWEPACGALWDSRAAEAVCRALGCGGAEAASQLAPPTPELPPPPAAGNTSVAANATLAGAPALLCSGAEWRLCEVVEHACRSDGRRARVTCAENRALRLVDGGGACAGRVEMLEHGEWGSVCDDTWDLEDAHVVCRQLGCGWAVQALPGLHFMPGRGPIHRDQVNCSGAEAYLWDCPGLPGQHYCGHKEDAGVVCSEHQSWRLTGGADRCEGQVEVHFRGVWNTVCDSEWYPSEAKVLCQSLGCGTAVERPKGLPHSLSGRMYYSCNGEELTLSNCSWRFNNSNLCSQSLAARVLCSASRSLHNLSTPEVPASVQTVTIESSVTVKIENKESRELMLLIPSIVLGILLLGSLIFIAFILLRIKGKYALPVMVNHQHLPTTIPAGSNSYQPVPITIPKEVFMLPIQVQAPPPEDSDSGSDSDYEHYDFSAQPPVALTTFYNSQRHRVTDEEVQQSRFQMPPLEEGLEELHASHIPTANPGHCITDPPSLGPQYHPRSNSESSTSSGEDYCNSPKSKLPPWNPQVFSSERSSFLEQPPNLELASTQPAFSAGPPADDSSSTSSGEWYQNFQPPPQPPSEEQFGCPGSPSPQPDSTDNDDYDDISAA

SEQ ID NO: 3160 - protein, 170 aa, Homo sapiens
MEDPNPEENMKQQDSPKERSPQSPGGNICHLGAPKCTRCLITFADSKFQERHMKREHPADFVAQKLQGVLFICFTCARSFPSSKALITHQRSHGPAAKPTLPVATTTAQPTFPCPDCGKTFGQAVSLRRHRQMHEVRAPPGTFACTECGQDFAQEAGLHQHYIRHARGEL

SEQ ID NO: 3161 - protein, 837 aa, Homo sapiens
MAEPSQAPTPAPAAQPRPLQSPAPAPTPTPAPSPASAPIPTPTPAPAPAPAAAPAGSTGTGGPGVGSGGAGSGGDPARPGLSQQQRASQRKAQVRGLPRAKKLEKLGVFSACKANGTCKCNGWKNPKPPTAPRIDLQQPAANLSELCRSCEHPLADHVSHLENVSEDEINRLLGMVVDVENLFMSVHKEEDTDTKQVYFYLFKLLRKCILQMTRPVVEGSLGSPPFEKPNIEQGVLNFVQYKFSHLAPRERQTMFELSKMFLLCLNYWELETPAQFRQRSQAEDVATYKVNYTRWLCYCHVPQSCDSLPRYETTHVFGRSLLRSIFTVTRRQLLEKFRVEKDKLVPEKRTLILTHFPKFLSMLEEEIYGANSPIWESGFTMPPSEGTQLVPRPASVSAAVVPSTPIFSPSMGGGSNSSLSLDSAGAEPMPGEKRTLPENLTLEDAKRLRVMGDIPMELVNEVMLTITDPAAMLGPETSLLSANAARDETARLEERRGIIEFHVIGNSLTPKANRRVLLWLVGLQNVFSHQLPRMPKEYIARLVFDPKHKTLALIKDGRVIGGICFRMFPTQGFTEIVFCAVTSNEQVKGYGTHLMNHLKEYHIKHNILYFLTYADEYAIGYFKKQGFSKDIKVPKSRYLGYIKDYEGATLMECELNPRIPYTELSHIIKKQKEIIKKLIERKQAQIRKVYPGLSCFKEGVRQIPVESVPGIRETGWKPLGKEKGKELKDPDQLYTTLKNLLAQIKSHPSAWPFMEPVKKSEAPDYYEVIRFPIDLKTMTERLRSRYYVTRKLFVADLQRVIANCREYNPPDSEYCRCASALEKFFYFKLKEGGLIDK

SEQ ID NO: 3162 - protein, 1504 aa, Homo sapiens
MATARTFGPEREAEPAKEARVVGSELVDTYTVYIIQVTDGSHEWTVKHRYSDFHDLHEKLVAERKIDKNLLPPKKIIGKNSRSLVEKREKDLEVYLQKLLAAFPGVTPRVLAHFLHFHFYEINGITAALAEELFEKGEQLLGAGEVFAIGPLQLYAVTEQLQQGKPTCASGDAKTDLGHILDFTCRLKYLKVSGTEGPFGTSNIQEQLLPFDLSIFKSLHQVEISHCDAKHIRGLVASKPTLATLSVRFSATSMKEVLVPEASEFDEWEPEGTTLEGPVTAVIPTWQALTTLDLSHNSISEIDESVKLIPKIEFLDLSHNGLLVVDNLQHLYNLVHLDLSYNKLSSLEGLHTKLGNIKTLNLAGNLLESLSGLHKLYSLVNLDLRDNRIEQMEEVRSIGSLPCLEHVSLLNNPLSIIPDYRTKVLAQFGERASEVCLDDTVTTEKELDTVEVLKAIQKAKEVKSKLSNPEKKGGEDSRLSAAPCIRPSSSPPTVAPASASLPQPILSNQGIMFVQEEALASSLSSTDSLTPEHQPIAQGCSDSLESIPAGQAASDDLRDVPGAVGGASPEHAEPEVQVVPGSGQIIFLPFTCIGYTATNQDFIQRLSTLIRQAIERQLPAWIEAANQREEGQGEQGEEEDEEEEEEEDVAENRYFEMGPPDVEEEEGGGQGEEEEEEEEDEEAEEERLALEWALGADEDFLLEHIRILKVLWCFLIHVQGSIRQFAACLVLTDFGIAVFEIPHQESRGSSQHILSSLRFVFCFPHGDLTEFGFLMPELCLVLKVRHSENTLFIISDAANLHEFHADLRSCFAPQHMAMLCSPILYGSHTSLQEFLRQLLTFYKVAGGCQERSQGCFPVYLVYSDKRMVQTAAGDYSGNIEWASCTLCSAVRRSCCAPSEAVKSAAIPYWLLLTPQHLNVIKADFNPMPNRGTHNCRNRNSFKLSRVPLSTVLLDPTRSCTQPRGAFADGHVLELLVGYRFVTAIFVLPHEKFHFLRVYNQLRASLQDLKTVVIAKTPGTGGSPQGSFADGQPAERRASNDQRPQEVPAEALAPAPAEVPAPAPAAASASGPAKTPAPAEASTSALVPEETPVEAPAPPPAEAPAQYPSEHLIQATSEENQIPSHLPACPSLRHVASLRGSAIIELFHSSIAEVENEELRHLMWSSVVFYQTPGLEVTACVLLSTKAVYFVLHDGLRRYFSEPLQDFWHQKNTDYNNSPFHISQCFVLKLSDLQSVNVGLFDQHFRLTGSTPMQVVTCLTRDSYLTHCFLQHLMVVLSSLERTPSPEPVDKDFYSEFGNKTTGKMENYELIHSSRVKFTYPSEEEIGDLTFTVAQKMAEPEKAPALSILLYVQAFQVGMPPPGCCRGPLRPKTLLLTSSEIFLLDEDCVHYPLPEFAKEPPQRDRYRLDDGRRVRDLDRVLMGYQTYPQALTLVFDDVQGHDLMGSVTLDHFGEVPGGPARASQGREVQWQVFVPSAESREKLISLLARQWEALCGRELPVELTG

SEQ ID NO: 3163 - protein, 375 aa, Homo sapiens
MLDRDVGPTPMYPPTYLEPGIGRHTPYGNQTDYRIFELNKRLQNWTEECDNLWWDAFTTEFFEDDAMLTITFCLEDGPKRYTIGRTLIPRYFRSIFEGGATELYYVLKHPKEAFHSNFVSLDCDQGSMVTQHGKPMFTQVCVEGRLYLEFMFDDMMRIKTWHFSIRQHRELIPRSILAMHAQDPQMLDQLSKNITRCGLSNSTLNYLRLCVILEPMQELMSRHKTYSLSPRDCLKTCLFQKWQRMVAPPAEPTRQQPSKRRKRKMSGGSTMSSGGGNTNNSNSKKKSPASTFALSSQVPDVMVVGEPTLMGGEFGDEDERLITRLENTQFDAANGIDDEDSFNNSPALGANSPWNSKPPSSQESKSENPTSQASQ

SEQ ID NO: 3164 - protein, 105 aa, Homo sapiens
MVKQIESKTAFQEALDAAGDKLVVVDFSATWCGPCKMIKPFFHSLSEKYSNVIFLEVDVDDCQDVASECEVKCMPTFQFFKKGQKVGEFSGANKEKLEATINELV

SEQ ID NO: 3165 - protein, 329 aa, Homo sapiens
MSAEASGPAAAAAPSLEAPKPSGLEPGPAAYGLKPLTPNSKYVKLNVGGSLHYTTLRTLTGQDTMLKAMFSGRVEVLTDAGGWVLIDRSGRHFGTILNYLRDGSVPLPESTRELGELLGEARYYLVQGLIEDCQLALQQKRETLSPLCLIPMVTSPREEQQLLASTSKPVVKLLHNRSNNKYSYTSTSDDNLLKNIELFDKLALRFHGRLLFLKDVLGDEICCWSFYGQGRKIAEVCCTSIVYATEKKQTKVEFPEARIFEETLNILIYETPRGPDPALLEATGGAAGAGGAGRGEDEENREHRVRRIHVRRHITHDERPHGQQIVFKD

SEQ ID NO: 3166 - protein, 219 aa, Homo sapiens
MNSSKSSETQCTERGCFSSQMFLWTVAGIPILFLSACFITRCVVTFRIFQTCDEKKFQLPENFTELSCYNYGSGSVKNCCPLNWEYFQSSCYFFSTDTISWALSLKNCSAMGAHLVVINSQEEQEFLSYKKPKMREFFIGLSDQVVEGQWQWVDGTPLTKSLSFWDVGEPNNIATLEDCATMRDSSNPRQNWNDVTCFLNYFRICEMVGINPLNKGKSL

SEQ ID NO: 3167 - protein, 627 aa, Homo sapiens
MAAAVLTDRAQVSVTFDDVAVTFTKEEWGQLDLAQRTLYQEVMLENCGLLVSLGCPVPKAELICHLEHGQEPWTRKEDLSQDTCPGDKGKPKTTEPTTCEPALSEGISLQGQVTQGNSVDSQLGQAEDQDGLSEMQEGHFRPGIDPQEKSPGKMSPECDGLGTADGVCSRIGQEQVSPGDRVRSHNSCESGKDPMIQEEENNFKCSECGKVFNKKHLLAGHEKIHSGVKPYECTECGKTFIKSTHLLQHHMIHTGERPYECMECGKAFNRKSYLTQHQRIHSGEKPYKCNECGKAFTHRSNFVLHNRRHTGEKSFVCTECGQVFRHRPGFLRHYVVHSGENPYECLECGKVFKHRSYLMWHQQTHTGEKPYECSECGKVFLESAALIHHYVIHTGEKPFECLECGKAFNHRSYLKRHQRIHTGEKPFVCSECGKAFTHCSTFILHKRAHTGEKPFECKECGKAFSNRKDLIRHFSIHTGEKPYECVECGKAFTRMSGLTRHKRIHSGEKPYECVECGKSFCWSTNLIRHAIIHTGEKPYKCSECGKAFSRSSSLTQHQRMHTGKNPISVTDVGRPFTSGQTSVTLRELLLGKDFLNVTTEANILPEETSSSASDQPYQRETPQVSSL

SEQ ID NO: 3168 - protein, 327 aa, Homo sapiens
MAAAAAMAEQESARNGGRNRGGVQRVEGKLRASVEKGDYYEAHQMYRTLFFRYMSQSKHTEARELMYSGALLFFSHGQQNSAADLSMLVLESLEKAEVEVADELLENLAKVFSLMDPNSPERVTFVSRALKWSSGGSGKLGHPRLHQLLALTLWKEQNYCESRYHFLHSADGEGCANMLVEYSTSRGFRSEVDMFVAQAVLQFLCLKNKSSASVVFTTYTQKHPSIEDGPPFVEPLLNFIWFLLLAVDGGKLTVFTVLCEQYQPSLRRDPMYNEYLDRIGQLFFGVPPKQTSSYGGLLGNLLTSLMGSSEQEDGEESPSDGSPIELD

SEQ ID NO: 3169 - protein, 619 aa, Homo sapiens
MADEGKSYSEHDDERVNFPQRKKKGRGPFRWKYGEGNRRSGRGGSGIRSSRLEEDDGDVAMSDAQDGPRVRYNPYTTRPNRRGDTWHDRDRIHVTVRRDRAPPERGGAGTSQDGTSKNWFKITIPYGRKYDKAWLLSMIQSKCSVPFTPIEFHYENTRAQFFVEDASTASALKAVNYKILDRENRRISIIINSSAPPHTILNELKPEQVEQLKLIMSKRYDGSQQALDLKGLRSDPDLVAQNIDVVLNRRSCMAATLRIIEENIPELLSLNLSNNRLYRLDDMSSIVQKAPNLKILNLSGNELKSERELDKIKGLKLEELWLDGNSLCDTFRDQSTYISAIRERFPKLLRLDGHELPPPIAFDVEAPTTLPPCKGSYFGTENLKSLVLHFLQQYYAIYDSGDRQGLLDAYHDGACCSLSIPFIPQNPARSSLAEYFKDSRNVKKLKDPTLRFRLLKHTRLNVVAFLNELPKTQHDVNSFVVDISAQTSTLLCFSVNGVFKEVDGKSRDSLRAFTRTFIAVPASNSGLCIVNDELFVRNASSEEIQRAFAMPAPTPSSSPVPTLSPEQQEMLQAFSTQSGMNLEWSQKCLQDNNWDYTRSAQAFTHLKAKGEIPEVAFMK

SEQ ID NO: 3170 - protein, 90 aa, Homo sapiens
MSTAMNFGTKSFQPRPPDKGSFPLDHLGECKSFKEKFMKCLHNNNFENALCRKESKEYLECRMERKLMLQEPLEKLGFGDLTSGKSEAKK

SEQ ID NO: 3171 - protein, 427 aa, Homo sapiens
MGTPKPRILPWLVSQLDLGQLEGVAWVNKSRTRFRIPWKHGLRQDAQQEDFGIFQAWAEATGAYVPGRDKPDLPTWKRNFRSALNRKEGLRLAEDRSKDPHDPHKIYEFVNSGVGDFSQPDTSPDTNGGGSTSDTQEDILDELLGNMVLAPLPDPGPPSLAVAPEPCPQPLRSPSLDNPTPFPNLGPSENPLKRLLVPGEEWEFEVTAFYRGRQVFQQTISCPEGLRLVGSEVGDRTLPGWPVTLPDPGMSLTDRGVMSYVRHVLSCLGGGLALWRAGQWLWAQRLGHCHTYWAVSEELLPNSGHGPDGEVPKDKEGGVFDLGPFIVDLITFTEGSGRSPRYALWFCVGESWPQDQPWTKRLVMVKVVPTCLRALVEMARVGGASSLENTVDLHISNSHPLSLTSDQYKAYLQDLVEGMDFQGPGES

SEQ ID NO: 3172 - protein, 469 aa, Homo sapiens
MSIFPKISLRPEVENYLKEGFMNKEIVTALGKQEAERKFETLLKHLSHPPSFTTVRVNTHLASVQHVKNLLLDELQKQFNGLSVPILQHPDLQDVLLIPVIGPRKNIKKQQCEAIVGAQCGNAVLRGAHVYAPGIVSASQFMKAGDVISVYSDIKGKCKKGAKEFDGTKVFLGNGISELSRKEIFSGLPELKGMGIRMTEPVYLSPSFDSVLPRYLFLQNLPSALVSHVLNPQPGEKILDLCAAPGGKTTHIAALMHDQGEVIALDKIFNKVEKIKQNALLLGLNSIRAFCFDGTKAVKLDMVEDTEGEPPFLPESFDRILLDAPCSGMGQRPNMACTWSVKEVASYQPLQRKLFTAAVQLLKPEGVLVYSTCTITLAENEEQVAWALTKFPCLQLQPQEPQIGGEGMRGAGLSCEQLKQLQRFDPSAVPLPDTDMDSLREARREDMLRLANKDSIGFFIAKFVKCKST

SEQ ID NO: 3173 - protein, 251 aa, Homo sapiens
MAHRLQIRLLTWDVKDTLLRLRHPLGEAYATKARAHGLEVEPSALEQGFRQAYRAQSHSFPNYGLSHGLTSRQWWLDVVLQTFHLAGVQDAQAVAPIAEQLYKDFSHPCTWQVLDGAEDTLRECRTRGLRLAVISNFDRRLEGILGGLGLREHFDFVLTSEAAGWPKPDPRIFQEALRLAHMEPVVAAHVGDNYLCDYQGPRAVGMHSFLVVGPQALDPVVRDSVPKEHILPSLAHLLPALDCLEGSTPGL

SEQ ID NO: 3174 - protein, 449 aa, Homo sapiens
MSDIRHSLLRRDALSAAKEVLYHLDIYFSSQLQSAPLPIVDKGPVELLEEFVFQVPKERSAQPKRLNSLQELQLLEIMCNYFQEQTKDSVRQIIFSSLFSPQGNKADDSRMSLLGKLVSMAVAVCRIPVLECAASWLQRTPVVYCVRLAKALVDDYCCLVPGSIQTLKQIFSASPRFCCQFITSVTALYDLSSDDLIPPMDLLEMIVTWIFEDPRLILITFLNTPIAANLPIGFLELTPLVGLIRWCVKAPLAYKRKKKPPLSNGHVSNKVTKDPGVGMDRDSHLLYSKLHLSVLQVLMTLQLHLTEKNLYGRLGLILFDHMVPLVEEINRLADELNPLNASQEIELSLDRLAQALQVAMASGALLCTRDDLRTLCSRLPHNNLLQLVISGPVQQSPHAALPPGFYPHIHTPPLGYGAVPAHPAAHPALPTHPGHTFISGVTFPFRPIR

SEQ ID NO: 3175 - protein, 749 aa, Homo sapiens
MSGSHTPACGPFSALTPSIWPQEILAKYTQKEESAEQPEFYYDEFGFRVYKEEGDEPGSSLLANSPLMEDAPQRLRWQAHLEFTHNHDVGDLTWDKIAVSLPRSEKLRSLVLAGIPHGMRPQLWMRLSGALQKKRNSELSYREIVKNSSNDETIAAKQIEKDLLRTMPSNACFASMGSIGVPRLRRVLRALAWLYPEIGYCQGTGMVAACLLLFLEEEDAFWMMSAIIEDLLPASYFSTTLLGVQTDQRVLRHLIVQYLPRLDKLLQEHDIELSLITLHWFLTAFASVVDIKLLLRIWDLFFYEGSRVLFQLTLGMLHLKEEELIQSENSASIFNTLSDIPSQMEDAELLLGVAMRLAGSLTDVAVETQRRKHLAYLIADQGQLLGAGTLTNLSQVVRRRTQRRKSTITALLFGEDDLEALKAKNIKQTELVADLREAILRVARHFQCTDPKNCSVELTPDYSMESHQRDHENYVACSRSHRRRAKALLDFERHDDDELGFRKNDIITIVSQKDEHCWVGELNGLRGWFPAKFVEVLDERSKEYSIAGDDSVTEGVTDLVRGTLCPALKALFEHGLKKPSLLGGACHPWLFIEEAAGREVERDFASVYSRLVLCKTFRLDEDGKVLTPEELLYRAVQSVNVTHDAVHAQMDVKLRSLICVGLNEQVLHLWLEVLCSSLPTVEKWYQPWSFLRSPGWVQIKCELRVLCCFAFSLSQDWELPAKREAQQPLKEGVRDMLVKHHLFSWDVDG

SEQ ID NO: 3176 - protein, 237 aa, Homo sapiens
MGRKSSKAKEKKQKRLEERAAMDAVCAKVDAANRLGDPLEAFPVFKKYDRNGLNVSIECKRVSGLEPATVDWAFDLTKTNMQTMYEQSEWGWKDREKREEMTDDRAWYLIAWENSSVPVAFSHFRFDVECGDEVLYCYEVQLESKVRRKGLGKFLIQILQLMANSTQMKKVMLTVFKHNHGAYQFFREALQFEIDDSSPSMSGCCGEDCSYEILSRRTKFGDSHHSHAGGHCSGCCH

SEQ ID NO: 3177 - protein, 556 aa, Homo sapiens
MELCGLGLPRPPMLLALLLATLLAAMLALLTQVALVVQVAEAARAPSVSAKPGPALWPLPLSVKMTPNLLHLAPENFYISHSPNSTAGPSCTLLEEAFRRYHGYIFGFYKWHHEPAEFQAKTQVQQLLVSITLQSECDAFPNISSDESYTLLVKEPVAVLKANRVWGALRGLETFSQLVYQDSYGTFTINESTIIDSPRFSHRGILIDTSRHYLPVKIILKTLDAMAFNKFNVLHWHIVDDQSFPYQSITFPELSNKGSYSLSHVYTPNDVRMVIEYARLRGIRVLPEFDTPGHTLSWGKGQKDLLTPCYSRQNKLDSFGPINPTLNTTYSFLTTFFKEISEVFPDQFIHLGGDEVEFKCWESNPKIQDFMRQKGFGTDFKKLESFYIQKVLDIIATINKGSIVWQEVFDDKAKLAPGTIVEVWKDSAYPEELSRVTASGFPVILSAPWYLDLISYGQDWRKYYKVEPLDFGGTQKQKQLFIGGEACLWGEYVDATNLTPRLWPRASAVGERLWSSKDVRDMDDAYDRLTRHRCRMVERGIAAQPLYAGYCNHENM

SEQ ID NO: 3178 - protein, 405 aa, Homo sapiens
MGPPLAPRPAHVPGEAGPRRTRESRPGAVSFADVAVYFSPEEWECLRPAQRALYRDVMRETFGHLGALGFSVPKPAFISWVEGEVEAWSPEAQDPDGESSAAFSRGQGQEAGSRDGNEEKERLKKCPKQKEVAHEVAVKEWWPSVACPEFCNPRQSPMNPWLKDTLTRRLPHSCPDCGRNFSYPSLLASHQRVHSGERPFSCGQCQARFSQRRYLLQHQFIHTGEKPYPCPDCGRRFRQRGSLAIHRRAHTGEKPYACSDCKSRFTYPYLLAIHQRKHTGEKPYSCPDCSLRFAYTSLLAIHRRIHTGEKPYPCPDCGRRFTYSSLLLSHRRIHSDSRPFPCVECGKGFKRKTALEAHRWIHRSCSERRAWQQAVVGRSEPIPVLGGKDPPVHFRHFPDIFQECG

SEQ ID NO: 3179 - protein, 308 aa, Homo sapiens
MRERRRERWKAKGGKLRGGGSRNRDWDRLPSAKRTQNGGGSGGGGGGSSRVAAVAAAAPPEGGSEGRLAPPSTFHSFLLAFFPTVPRSARLRPRSAHARPHAYECLRARRWLLPPTTTFGRPARQPARTRSPTGTPSSSPSLPLRPCQAGAGAGPHAYLQRRKPKPPPPPPPPPLLSSPPFPAPTATNRRHGRRRRRQPPLPPSTPRACASHNPPRGTVPFLSAAGAGEEGTGRAGRGLPFDWNCQNGGPSPTTTYLPGLLAAALRLASLCSSSSAGSRRADRGLPSAPLPTGGWRPRRLRVESFPAG

SEQ ID NO: 3180 - protein, 145 aa, Homo sapiens
MRVQGSGEEGVAARLLRFPGSTADPSRLSGGGQRGQERKGRAERVGACRLTGIARMADRAPRQPTSLGSSPQRCGSPPSAPPPPPDRGERIEDCLAPLCPPVVGGRGGCALSRFLPVDLSLLRSSRTAAVELVAGGVCRSPSQEN

SEQ ID NO: 3181 - protein, 157 aa, Homo sapiens
MPAQIVLLTVSEAEAEAESDESAGKWGRGGGRQAPPLPWVHGGSLPLVRRRPAVAGPLLWSWSQAVCAGRLVRRTSPRLTVREWTDTGIVPLRERSGTPDLQEVGSEASRTGAPPGGFLPGVELPTWDPRKIGVVVCFLLLLTLLGFLEFHTTVHMR

SEQ ID NO: 3182 - protein, 618 aa, Homo sapiens
MRRDVRILLLGEAQVGKTSLILSLVGEEFPEEVPPRAEEITIPADVTPEKVPTHIVDYSEAEQTDEELREEIHKANVVCVVYDVSEEATIEKIRTKWIPLVNGGTTQGPRVPIILVGNKSDLRSGSSMEAVLPIMSQFPEIETCVECSAKNLRNISELFYYAQKAVLHPTAPLYDPEAKQLRPACAQALTRIFRLSDQDLDQALSDEELNAFQKSCFGHPLAPQALEDVKTVVCRNVAGGVREDRLTLDGFLFLNTLFIQRGRHETTWTILRRFGYSDALELTADYLSPLIHVPPGCSTELNHLGYQFVQRVFEKHDQDRDGALSPVELQSLFSVFPAAPWGPELPRTVRTEAGRLPLHGYLCQWTLVTYLDVRSCLGHLGYLGYPTLCEQDQAHAITVTREKRLDQEKGQTQRSVLLCKVVGARGVGKSAFLQAFLGRGLGHQDTREQPPGYAIDTVQVNGQEKYLILCEVGTDGLLATSLDATCDVACLMFDGSDPKSFAHCASVYKHHYMDGQTPCLFVSSKADLPEGVAVSGPSPAEFCRKHRLPAPVPFSCAGPAEPSTTIFTQLATMAAFPHLVHAELHPSSFWLRGLLGVVGAAVAAVLSFSLYRVLVKSQ

SEQ ID NO: 3183 - protein, 139 aa, Homo sapiens
MPHPRRYHSSERGSRGSYREHYRSRKHKRRRSRSWSSSSDRTRRRRREDSYHVRSRSSYDDRSSDRRVYDRRYCGSYRRNDYSRDRGDAYYDTDYRHSYEYQRENSSYRSQRSSRRKHRRRRRRSRTFSRSSSMKSLAP

SEQ ID NO: 3184 - protein, 498 aa, Homo sapiens
MPHPRRYHSSERGSRGSYREHYRSRKHKRRRSRSWSSSSDRTRRRRREDSYHVRSRSSYDDRSSDRRVYDRRYCGSYRRNDYSRDRGDAYYDTDYRHSYEYQRENSSYRSQRSSRRKHRRRRRRSRTFSRSSSHSSRRAKSVEDDAEGHLIYHVGDWLQERYEIVSTLGEGTFGRVVQCVDHRRGGARVALKIIKNVEKYKEAARLEINVLEKINEKDPDNKNLCVQMFDWFDYHGHMCISFELLGLSTFDFLKDNNYLPYPIHQVRHMAFQLCQAVKFLHDNKLTHTDLKPENILFVNSDYELTYNLEKKRDERSVKSTAVRVVDFGSATFDHEHHSTIVSTRHYRAPEVILELGWSQPCDVWSIGCIIFEYYVGFTLFQTHDNREHLAMMERILGPIPSRMIRKTRKQKYFYRGRLDWDENTSAGRYVRENCKPLRRYLTSEAEEHHQLFDLIESMLEYEPAKRLTLGEALQHPFFARLRAEPPNKLWDSSRDISR

SEQ ID NO: 3185 - protein, 297 aa, Homo sapiens
MAGYATTPSPMQTLQEEAVCAICLDYFKDPVSISCGHNFCRGCVTQLWSKEDEEDQNEEEDEWEEEEDEEAVGAMDGWDGSIREVLYRGNADEELFQDQDDDELWLGDSGITNWDNVDYMWDEEEEEEEEDQDYYLGGLRPDLRIDVYREEEILEAYDEDEDEELYPDIHPPPSLPLPGQFTCPQCRKSFTRRSFRPNLQLANMVQIIRQMCPTPYRGNRSNDQGMCFKHQEALKLFCEVDKEAICVVCRESRSHKQHSVLPLEEVVQEYQEIKLETTLVGILQIEQESIHSKAYNQ

SEQ ID NO: 3186 - protein, 847 aa, Homo sapiens
MHLLGPWLLLLVLEYLAFSDSSKWVFEHPETLYAWEGACVWIPCTYRALDGDLESFILFHNPEYNKNTSKFDGTRLYESTKDGKVPSEQKRVQFLGDKNKNCTLSIHPVHLNDSGQLGLRMESKTEKWMERIHLNVSERPFPPHIQLPPEIQESQEVTLTCLLNFSCYGYPIQLQWLLEGVPMRQAAVTSTSLTIKSVFTRSELKFSPQWSHHGKIVTCQLQDADGKFLSNDTVQLNVKHTPKLEIKVTPSDAIVREGDSVTMTCEVSSSNPEYTTVSWLKDGTSLKKQNTFTLNLREVTKDQSGKYCCQVSNDVGPGRSEEVFLQVQYAPEPSTVQILHSPAVEGSQVEFLCMSLANPLPTNYTWYHNGKEMQGRTEEKVHIPKILPWHAGTYSCVAENILGTGQRGPGAELDVQYPPKKVTTVIQNPMPIREGDTVTLSCNYNSSNPSVTRYEWKPHGAWEEPSLGVLKIQNVGWDNTTIACARCNSWCSWASPVALNVQYAPRDVRVRKIKPLSEIHSGNSVSLQCDFSSSHPKEVQFFWEKNGRLLGKESQLNFDSISPEDAGSYSCWVNNSIGQTASKAWTLEVLYAPRRLRVSMSPGDQVMEGKSATLTCESDANPPVSHYTWFDWNNQSLPHHSQKLRLEPVKVQHSGAYWCQGTNSVGKGRSPLSTLTVYYSPETIGRRVAVGLGSCLAILILAICGLKLQRRWKRTQSQQGLQENSSGQSFFVRNKKVRRAPLSEGPHSLGCYNPMMEDGISYTTLRFPEMNIPRTGDAESSEMQRPPRTCDDTVTYSALHKRQVGDYENVIPDFPEDEGIHYSELIQFGVGERPQAQENVDYVILKH

SEQ ID NO: 3187 - protein, 538 aa, Homo sapiens
MAAAAPVAADDDERRRRPGAALEDSRSQEGANGEAESGELSRLRAELAGALAEMETMKAVAEVSESTKAEAVAAVQRQCQEEVASLQAILKDSISSYEAQITALKQERQQQQQDCEEKERELGRLKQLLSRAYPLDSLEKQMEKAHEDSEKLREIVLPMEKEIEELKAKLLRAEELIQEIQRRPRHAPSLHGSTELLPLSRDPSPPLEPLEELSGDGGPAAEAFAHNCDDSASISSFSLGGGVGSSSSLPQSRQGLSPEQEETASLVSTGTLVPEGIYLPPPGYQLVPDTQWEQLQTEGRQLQKDLESVSRERDELQEGLRRSNEDCAKQMQVLLAQVQNSEQLLRTLQGTVSQAQERVQLQMAELVTTHKCLHHEVKRLNEENQGLRAEQLPSSAPQGSQQEQGEEESLPSSVPELQQLLCCTRQEARARLQAQEHGAERLRIEIVTLREALEEETVARASLEGQLRVQREETEVLEASLCSLRTEMERVQQEQSKAQLPDLLSEQRAKVLRLQAELETSEQCRGISCDCPRPCRCA

SEQ ID NO: 3188 - protein, 429 aa, Homo sapiens
MGLYAAAAGVLAGVESRQGSIKGLVYSSNFQNVKQLYALVCETQRYSAVLDAVIASAGLLRAEKKLRPHLAKVLVYELLLGKGFRGGGGRWKALLGRHQARLKAELARLKVHRGVSRNEDLLEVGSRPGPASQLPRFVRVNTLKTCSDDVVDYFKRQGFSYQGRASSLDDLRALKGKHFLLDPLMPELLVFPAQTDLHEHPLYRAGHLILQDRASCLPAMLLDPPPGSHVIDACAAPGNKTSHLAALLKNQGKIFAFDLDAKRLASMATLLARAGVSCCELAEEDFLAVSPSDPRYHEVHYILLDPSCSGSGMPSRQLEEPGAGTPSPVRLHALAGFQQRALCHALTFPSLQRLVYSTCSLCQEENEDVVRDALQQNPGAFRLAPALPAWPHRGLSTFPGAEHCLRASPETTLSSGFFVAVIERVEVPR

SEQ ID NO: 3189 - protein, 466 aa, Homo sapiens
MGLYAAAAGVLAGVESRQGSIKGLVYSSNFQNVKQLYALVCETQRYSAVLDAVIASAGLLRAEKKLRPHLAKVLVYELLLGKGFRGGGGRWKALLGRHQARLKAELARLKVHRGVSRNEDLLEVGSRPGPASQLPRFVRVNTLKTCSDDVVDYFKRQGFSYQGRASSLDDLRALKGKHFLLDPLMPELLVFPAQTDLHEHPLYRAGHLILQDRASCLPAMLLDPPPGSHVIDACAAPGNKTSHLAALLKNQGKIFAFDLDAKRLASMATLLARAGVSCCELAEEDFLAVSPSDPRYHEVHYILLDPSCSGSGMPSRQLEEPGAGTPSPVRLHALAGFQQRALCHALTFPSLQRLVYSTCSLCQEENEDVVRDALQQNPGAFRLAPALPAWPHRGLSTFPGAEHCLRASPETTLSSGFFVAVIERVEVPSSASQAKASAPERTPSPAPKRKKRQQRAAAGACTPPCT

SEQ ID NO: 3190 - protein, 432 aa, Homo sapiens
MILLRASEVRQLLHNKFVVILGDSVHRAVYKDLVLLLQKDRLLTPGQLRARGELNFEQDELVDGGQRGHMHNGLNYREVREFRSDHHLVRFYFLTRVYSDYLQTILKELQSGEHAPDLVIMNSCLWDISRYGPNSWRSYLENLENLFQCLGQVLPESCLLVWNTAMPVGEEVTGGFLPPKLRRQKATFLKNEVVKANFHSATEARKHNFDVLDLHFHFRHARENLHWDGVHWNGRVHRCLSQLLLAHVADAWGVELPHRHPVGEWIKKKKPGPRVEGPPQANRNHPALPLSPPLPSPTYRPLLGFPPQRLPLLPLLSPQPPPPILHHQGMPRFPQGPPDACFSSDHTFQSDQFYCHSDVPSSAHAGFFVEDNFMVGPQLPMPFFPTPRYQRPAPVVHRGFGRYRPRGPYTPWGQRPRPSKRRAPANPEPRPQ

SEQ ID NO: 3191 - protein, 406 aa, Homo sapiens
MAASAPPPPDKLEGGGGPAPPPAPPSTGRKQGKAGLQMKSPEKKRRKSNTQGPAYSHLTEFAPPPTPMVDHLVASNPFEDDFGAPKVGVAAPPFLGSPVPFGGFRVQGGMAGQVPPGYSTGGGGGPQPLRRQPPPFPPNPMGPAFNMPPQGPGYPPPGNMNFPSQPFNQPLGQNFSPPSGQMMPGPVGGFGPMISPTMGQPPRAELGPPSLSQRFAQPGAPFGPSPLQRPGQGLPSLPPNTSPFPGPDPGFPGPGGEDGGKPLNPPASTAFPQEPHSGSPAAAVNGNQPSFPPNSSGRGGGTPDANSLAPPGKAGGGSGPQPPPGLVYPCGACRSEVNDDQDAILCEASCQKWFHRECTGMTESAYGLLTTEASAVWACDLCLKTKEIQSVYIREGMGQLVAANDG

SEQ ID NO: 3192 - protein, 353 aa, Homo sapiens
MSTLLLNLDFGEPPPKKALEGNAKHRNFVKKRRLLERRGFLSKKNQPPSKAPKLHSEPSKKGETPTVDGTWKTPSFPKKKTAASSNGSGQPLDKKAAVSWLTPAPSKKADSVAAKVDLLGEFQSALPKINSHPTRSQKKSSQKKSSKKNHPQKNAPQNSTQAHSENKCSGASQKLPRKMVAIDCEMVGTGPKGHVSSLARCSIVNYNGDVLYDEYILPPCHIVDYRTRWSGIRKQHMVNATPFKIARGQILKILTGKIVVGHAIHNDFKALQYFHPKSLTRDTSHIPPLNRKADCPENATMSLKHLTKKLLNRDIQVGKSGHSSVEDAQATMELYKLVEVEWEEHLARNPPTD

SEQ ID NO: 3193 - protein, 237 aa, Homo sapiens
MSDSDLGEDEGLLSLAGKRKRRGNLPKESVKILRDWLYLHRYNAYPSEQEKLSLSGQTNLSVLQICNWFINARRRLLPDMLRKDGKDPNQFTISRRGGKASDVALPRGSSPSVLAVSVPAPTNVLSLSVCSMPLHSGQGEKPAAPFPRGELESPKPLVTPGSTLTLLTRAEAGSPTGGLFNTPPPTPPEQDKEDFSSFQLLVEVALQRAAEMELQKQQDPSLPLLHTPIPLVSENPQ

SEQ ID NO: 3194 - protein, 355 aa, Homo sapiens
MARRPRNSRAWHFVLSAARRDADARAVALAGSTNWGYDSDGQHSDSDSDPEYSTLPPSIPSAVPVTGESFCDCAGQSEASFCSSLHSAHRGRDCRCGEEDEYFDWVWDDLNKSSATLLSCDNRKVSFHMEYSCGTAAIRGTKELGEGQHFWEIKMTSPVYGTDMMVGIGTSDVDLDKYRHTFCSLLGRDEDSWGLSYTGLLHHKGDKTSFSSRFGQGSIIGVHLDTWHGTLTFFKNRKCIGVAATKLQNKRFYPMVCSTAARSSMKVTRSCASATSLQYLCCHRLRQLRPDSGDTLEGLPLPPGLKQVLHNKLGWVLSMSCSRRKAPVSDPQAATSAHPSSREPRPCQRKRCRRT

SEQ ID NO: 3195 - protein, 155 aa, Homo sapiens
MEEAAAAPISPWTMAATIQAMERKIESQAAHLLSLEGQTGMAEKKLADCEKTAVEFGNQLEGKWAVLGTLLQEYGLLQRRLENVENLLHNRNLWILRLPPGSKGESPKTTPSPSPRSSPRLNKGRSPATGAALTPRFQMFLWTPVQMQKLRPSRD

SEQ ID NO: 3196 - protein, 209 aa, Homo sapiens
MALLAEHLLKPLPADKQIETGPFLEAVSHLPPFFDCLGSPVFTPIKADISGNITKIKAVYDTNPAKFRTLQNILEVEKEMYGAEWPKVGATLALMWLKRGLRFIQVFLQSICDGERDENHPNLIRVNATKAYEMALKKYHGWIVQKIFQAALYAAPYKSDFLKALSKGQNVTEEECLEKIRLFLVNYTATIDVIYEMYTQMNAELNYKV

SEQ ID NO: 3197 - protein, 133 aa, Homo sapiens
MRMSLAQRVLLTWLFTLLFLIMLVLKLDEKAPWNWFLIFIPVWIFDTILLVLLIVKMAGRCKSGFDPRHGSHNIKKKAWYLIAMLLKLAFCLALCAKLEQFTTMNLSYVFIPLWALLAGALTELGYNVFFVRD

SEQ ID NO: 3198 - protein, 223 aa, Homo sapiens
MEVQKEAQRIMTLSVWKMYHSRMQRGGLRLHRSLQLSLVMRSARELYLSAKVEALEPEVSLPAALPSDPRLHPPREAESTAETATPDGEHPFPEPMDTQEAPTAEETSACCAPRPAKVSRKRRSSSLSDGGDAGLVPSKKARLEEKEEEEGASSEVADRLQPPPAQAEGAFPNLARVLQRRFSGLLNCSPAAPPTAPPACEAKPACRPADSMLNVLVRAVVAF

SEQ ID NO: 3199 - protein, 794 aa, Homo sapiens
MNIDDKLEGLFLKCGGIDEMQSSRTMVVMGGVSGQSTVSGELQDSVLQDRSMPHQEILAADEVLQESEMRQQDMISHDELMVHEETVKNDEEQMETHERLPQGLQYALNVPISVKQEITFTDVSEQLMRDKKQIREPVDLQKKKKRKQRSPAKILTINEDGSLGLKTPKSHVCEHCNAAFRTNYHLQRHVFIHTGEKPFQCSQCDMRFIQKYLLQRHEKIHTGEKPFRCDECGMRFIQKYHMERHKRTHSGEKPYQCEYCLQYFSRTDRVLKHKRMCHENHDKKLNTCAIKGGLLTSEEDSGFSTSPKDNSLPKKKRQKTEKKSSGMDKESALDKSDLKKDKNDYLPVYSSSTKVKDEYMVAEYAVEMPHSSVGGSHLEDASGEIHPPKLVLKKINSKRSLKQPLEQNQTISPLSTYEESKVSKYAFELVDKQALLDSEGNADIDQVDNLQEGPSKPVHSSTNYDDAMQFLKKKRYLQAASNNSREYALNVGTIRSQPSVTQAAVASVIDESTTASILESQALNVEIKSNHDKNVIPDEVLQTLLDHYSHKANGQHEISFSVADTEVTSSISINSSEVPEVTPSENVGSSSQASSSDKANMLQEYSKFLQQALDRTSQNDAYLNSPSLNFVTDNQTLPNQPAFSSIDKQVYATMPINSFRSGMNSPLRTTPDKSHFGLIVGDSQHSFPFSGDETNHASATSTQDFLDQVTSQKKAEAQPVHQAYQMSSFEQPFRAPYHGSRAGIATQFSTANGQVNLRGPGTSAEFSEFPLVNVNDNRAGMTSSPDATTGQTFG

SEQ ID NO: 3200 - protein, 197 aa, Homo sapiens
MMFPQSRHSGSSHLPQQLKFTTSDSCDRIKDEFQLLQAQYHSLKLECDKLASEKSEMQRHYVMYYEMSYGLNIEMHKQAEIVKRLNGICAQVLPYLSQEHQQQVLGAIERAKQVTAPELNSIIRQQLQAHQLSQLQALALPLTPLPVGLQPPSLPAVSAGTGLLSLSALGSQAHLSKEDKNGHDGDTHQEDDGEKSD

SEQ ID NO: 3201 - protein, 264 aa, Homo sapiens
MCHKNGFPQEGGITAAFLQKRKLRLSKNHRPARAKVTEHVRGTRPGRATAGPAASTRAAGSLFFDRWGNRGPAGCRGSSHLPQQLKFTTSDSCDRIKDEFQLLQAQYHSLKLECDKLASEKSEMQRHYVMYYEMSYGLNIEMHKQAEIVKRLNGICAQVLPYLSQEHQQQVLGAIERAKQVTAPELNSIIRQQLQAHQLSQLQALALPLTPLPVGLQPPSLPAVSAGTGLLSLSALGSQAHLSKEDKNGHDGDTHQEDDGEKSD

SEQ ID NO: 3202 - protein, 196 aa, Homo sapiens
MMFPQSRHSGSSHLPQQLKFTTSDSCDRIKDEFQLLQAQYHSLKLECDKLASEKSEMQRHYVMYYEMSYGLNIEMHKQAEIVKRLNGICAQVLPYLSQEHQQQVLGAIERAKQVTAPELNSIIRQLQAHQLSQLQALALPLTPLPVGLQPPSLPAVSAGTGLLSLSALGSQAHLSKEDKNGHDGDTHQEDDGEKSD

SEQ ID NO: 3203 - protein, 419 aa, Homo sapiens
MAEPVGKRGRWSGGSGAGRGGRGGWGGRGRRPRAQRSPSRGTLDVVSVDLVTDSDEEILEVATARGAADEVEVEPPEPPGPVASRDNSNSDSEGEDRRPAGPPREPVRRRRRLVLDPGEAPLVPVYSGKVKSSLRLIPDDLSLLKLYPPGDEEEAELADSSGLYHEGSPSPGSPWKTKLRTKDKEEKKKTEFLDLDNSPLSPPSPRTKSRTHTRALKKLSEVNKRLQDLRSCLSPKPPQGQEQQGQEDEVVLVEGPTLPETPRLFPLKIRCRADLVRLPLRMSEPLQSVVDHMATHLGVSPSRILLLFGETELSPTATPRTLKLGVADIIDCVVLTSSPEATETSQQLQLRVQGKEKHQTLEVSLSRDSPLKTLMSHYEEAMGLSGRKLSFFFDGTKLSGRELPADLGMESGDLIEVWG

SEQ ID NO: 3204 - protein, 247 aa, Homo sapiens
MSGKDRIEIFPSRMAQTIMKARLKGAQTGRNLLKKKSDALTLRFRQILKKIIETKMLMGEVMREAAFSLAEAKFTAGDFSTTVIQNVNKAQVKIRAKKDNVAGVTLPVFEHYHEGTDSYELTGLARGGEQLAKLKRNYAKAVELLVELASLQTSFVTLDEAIKITNRRVNAIEHVIIPRIERTLAYIITELDEREREEFYRLKKIQEKKKILKEKSEKDLEQRRAAGEVLEPANLLAEEKDEDLLFE

SEQ ID NO: 3205 - protein, 446 aa, Homo sapiens
MHEPSLCANVECPPAHTCPCGVPACSCAHVECPPAHTCRCGVPACSHMPMWSARLLTRAHVECPPAHTRVHVECPPAHVPMWSAHLLTCADVECHLLTHVPMWSARLLTCPCGVPACSHVPMRSARLLTRAHAECPPAHTCPCGVPACSHVPMRSARLLTRADVECPPAHTCPCGVPACSHVPTWSARLITRAHVECSPAHTCRCGVPACSHVPMWSVRLLTRADAECPPAHTCRCGVPACSHVPMWSARLLTCRCGVPACSHVPMWSARLLTCRCGVPACSHVPMWSARLLTRAHVECPPAHTCRRGVPACSRAHMECPPAHTCHCGVPACSHTCRCGVPACSHVPMWSARLLTRAYVECPPAHTRAHVECPPAHTCPCGVPACSHTCPCGVPACSHKALAWWFCRFPVLPAESDAVTVHSTHGGFLIRFYVKDPFYISLHLEIT

SEQ ID NO: 3206 - protein, 1138 aa, Homo sapiens
MALKMVKGSIDRMFDKNLQDLVRGIRNHKEDEAKYISQCIDEIKQELKQDNIAVKANAVCKLTYLQMLGYDISWAAFNIIEVMSASKFTFKRIGYLAASQSFHEGTDVIMLTTNQIRKDLSSPSQYDTGVALTGLSCFVTPDLARDLANDIMTLMSHTKPYIRKKAVLIMYKVFLKYPESLRPAFPRLKEKLEDPDPGVQSAAVNVICELARRNPKNYLSLAPLFFKLMTSSTNNWVLIKIIKLFGALTPLEPRLGKKLIEPLTNLIHSTSAMSLLYECVNTVIAVLISLSSGMPNHSASIQLCVQKLRILIEDSDQNLKYLGLLAMSKILKTHPKSVQSHKDLILQCLDDKDESIRLRALDLLYGMVSKKNLMEIVKKLMTHVDKAEGTTYRDELLTKIIDICSQSNYQYITNFEWYISILVELTRLEGTRHGHLIAAQMLDVAIRVKAIRKFAVSQMSALLDSAHLLASSTQRNGICEVLYAAAWICGEFSEHLQEPHHTLEAMLRPRVTTLPGHIQAVYVQNVVKLYASILQQKEQAGEAEGAQAVTQLMVDRLPQFVQSADLEVQERASCILQLVKHIQKLQAKDVPVAEEVSALFAGELNPVAPKAQKKVPVPEGLDLDAWINEPLSDSESEDERPRAVFHEEEQRRPKHRPSEADEEELARRREARKQEQANNPFYIKSSPSPQKRYQDTPGVEHIPVVQIDLSVPLKVPGLPMSDQYVKLEEERRHRQKLEKDKRRKKRKEKEKKGKRRHSSLPTESDEDIAPAQQVDIVTEEMPENALPSDEDDKDPNDPYRALDIDLDKPLADSEKLPIQKHRNTETSKSPEKDVPMVEKKSKKPKKKEKKHKEKERDKEKKKEKEKKKSPKPKKKKHRKEKEERTKGKKKSKKQPPGSEEAAGEPVQNGAPEEEQLPPESSYSLLAENSYVKMTCDIRGSLQEDSQVTVAIVLENRSSSILKGMELSVLDSLNARMARPQGSSVHDGVPVPFQLPPGVSNEAQYVFTIQSIVMAQKLKGTLSFIAKNDEGATHEKLDFRLHFSCSSYLITTPCYSDAFAKLLESGDLSMSSIKVDGIRMSFQNLLAKICFHHHFSVVERVDSCASMYSRSIQGHHVCLLVKKVRTLSQSTGSAVTPRY

SEQ ID NO: 3207 - protein, 782 aa, Homo sapiens
MNPEKDFAPLTPNIVRALNDKLYEKRKVAALEIEKLVREFVAQNNTVQIKHVIQTLSQEFALSQHPHSRKGGLIGLAACSIALGKDSGLYLKELIEPVLTCFNDADSRLRYYACEALYNIVKVARGAVLPHFNVLFDGLSKLAADPDPNVKSGSELLDRLLKDIVTESNKFDLVSFIPLLRERIYSNNQYARQFIISWILVLESVPDINLLDYLPEILDGLFQILGDNGKEIRKMCEVVLGEFLKEIKKNPSSVKFAEMANILVIHCQTTDDLIQLTAMCWMREFIQLAGRVMLPYSSGILTAVLPCLAYDDRKKSIKEVANVCNQSLMKLVTPEDDELDELRPGQRQAEPTPDDALPKQEGTASGGPDGSCDSSFSSGISVFTAASTERAPVTLHLDGIVQVLNCHLSDTAIGMMTRIAVLKWLYHLYIKTPRKMFRHTDSLFPILLQTLSDESDEVILKDLEVLAEIASSPAGQTDDPGPLDGPDLQASHSELQVPTPGRAGLLNTSGTKGLECSPSTPTMNSYFYKFMINLLKRFSSERKLLEVRGPFIIRQLCLLLNAENIFHSMADILLREEDLKFASTMVHALNTILLTSTELFQLRNQLKDLKTLESQNLFCCLYRSWCHNPVTTVSLCFLTQNYRHAYDLIQKFGDLEVTVDFLAEVDKLVQLIECPIFTYLRLQLLDVKNNPYLIKALYGLLMLLPQSSAFQLLSHRLQCVPNPELLQTEDSLKAAPKSQKADSPSIDYAELLQHFEKVQNKHLEVRHQRSGRGDHLDRRVVL

SEQ ID NO: 3208 - protein, 1121 aa, Homo sapiens
MPIVDKLKEALKPGRKDSADDGELGKLLASSAKKVLLQKIEFEPASKSFSYQLEALKSKYVLLNPKTEGASRHKSGDDPPARRQGSEHTYESCGDGVPAPQKVLFPTERLSLRWERVFRVGAGLHNLGNTCFLNATIQCLTYTPPLANYLLSKEHARSCHQGSFCMLCVMQNHIVQAFANSGNAIKPVSFIRDLKKIARHFRFGNQEDAHEFLRYTIDAMQKACLNGCAKLDRQTQATTLVHQIFGGYLRSRVKCSVCKSVSDTYDPYLDVALEIRQAANIVRALELFVKADVLSGENAYMCAKCKKKVPASKRFTIHRTSNVLTLSLKRFANFSGGKITKDVGYPEFLNIRPYMSQNNGDPVMYGLYAVLVHSGYSCHAGHYYCYVKASNGQWYQMNDSLVHSSNVKVVLNQQAYVLFYLRIPGSKKSPEGLISRTGSSSLPGRPSVIPDHSKKNIGNGIISSPLTGKRQDSGTMKKPHTTEEIGVPISRNGSTLGLKSQNGCIPPKLPSGSPSPKLSQTPTHMPTILDDPGKKVKKPAPPQHFSPRTAQGLPGTSNSNSSRSGSQRQGSWDSRDVVLSTSPKLLATATANGHGLKGNDESAGLDRRGSSSSSPEHSASSDSTKAPQTPRSGAAHLCDSQETNCSTAGHSKTPPSGADSKTVKLKSPVLSNTTTEPASTMSPPPAKKLALSAKKASTLWRATGNDLRPPPPSPSSDLTHPMKTSHPVVASTWPVHRARAVSPAPQSSSRLQPPFSPHPTLLSSTPKPPGTSEPRSCSSISTALPQVNEDLVSLPHQLPEASEPPRSPSEKRKKTFVGEPQRLGSETCLPQHIREATAAPHGKRKRKKKKRPEDTAASALQEGQTQRQPGSPMYRREGQAQLPAVRRQEDGTQPQVNGQQVGCVTDGHHASSRKRRRKGAEGLGEEGGLHQDPLRHSCSPMGDGDPEAMEESPRKKKKRKQETQRAVEEDGHLKCPRSAKPQDAVVPESSSCAPSANGWCPGDRMGLSQAPPVSWNGERESDVVQELLKYSSDKAYGRKVLTWDGKMSAVSQDAIEDSRQARTETVVDDWDEEFDRGKEKKIKKFKREKRRNFNAFQKLQTRRNFWSVTHPAKAASLSYRR

SEQ ID NO: 3209 - protein, 494 aa, Homo sapiens
MSTTLLSAFYDVDFLCKTEKSLANLNLNNMLDKKAVGTPVAAAPSSGFAPGFLRRHSASNLHALAHPAPSPGSCSPKFPGAANGSSCGSAAAGGPTSYGTLKEPSGGGGTALLNKENKFRDRSFSENGDRSQHLLHLQQQQKGGGGSQINSTRYKTELCRPFEESGTCKYGEKCQFAHGFHELRSLTRHPKYKTELCRTFHTIGFCPYGPRCHFIHNADERRPAPSGGASGDLRAFGTRDALHLGFPREPRPKLHHSLSFSGFPSGHHQPPGGLESPLLLDSPTSRTPPPPSCSSASSCSSSASSCSSASAASTPSGAPTCCASAAAAAAAALLYGTGGAEDLLAPGAPCAACSSASCANNAFAFGPELSSLITPLAIQTHNFAAVAAAAYYRSQQQQQQQGLAPPAQPPAPPSATLPAGAAAPPSPPFSFQLPRRLSDSPVFDAPPSPPDSLSDRDSYLSGSLSSGSLSGSESPSLDPGRRLPIFSRLSISDD

SEQ ID NO: 3210 - protein, 785 aa, Homo sapiens
MVVPSLKLQDLIEEIRGAKTQAQEREVIQKECAHIRASFRDGDPVHRHRQLAKLLYVHMLGYPAHFGQMECLKLIASSRFTDKRVGYLGAMLLLDERHDAHLLITNSIKNDLSQGIQPVQGLALCTLSTMGSAEMCRDLAPEVEKLLLQPSPYVRKKAILTAVHMIRKVPELSSVFLPPCAQLLHERHHGILLGTITLITELCERSPAALRHFRKVVPQLVHILRTLVTMGYSTEHSISGVSDPFLQVQILRLLRILGRNHEESSETMNDLLAQVATNTDTSRNAGNAVLFETVLTIMDIRSAAGLRVLAVNILGRFLLNSDRNIRYVALTSLLRLVQSDHSAVQRHRPTVVECLRETDASLSRRALELSLALVNSSNVRAMMQELQAFLESCPPDLRADCASGILLAAERFAPTKRWHIDTILHVLTTAGTHVRDDAVANLTQLIGGAQELHAYSVRRLYNALAEDISQQPLVQVAAWCIGEYGDLLLAGNCEEIEPLQVDEEEVLALLEKVLQSHMSLPATRGYALTALMKLSTRLCGDNNRIRQVVSIYGSCLDVELQQRAVEYDTLFRKYDHMRAAILEKMPLVERDGPQADEEAKESKEAAQLSEAAPVPTEPQASQLLDLLDLLDGASGDVQHPPHLDPSPGGALVHLLDLPCVPPPPAPIPDLKVFEREGVQLNLSFIRPPENPALLLITITATNFSEGDVTHFICQAAVPKSLQLQLQAPSGNTVPARGGLPITQLFRILNPNKAPLRLKLRLTYDHFHQSVQEIFEVNNLPVESWQ

SEQ ID NO: 3211 - protein, 785 aa, Homo sapiens; identical to SEQ ID NO: 3210

SEQ ID NO: 3212 - protein, 64 aa, Homo sapiens
MFLQYYLNEQGDRVYTLKKFDPMGQQTCSAHPARFSPDDKYSRHRITIKKRFKVLMTQQPRPVL

SEQ ID NO: 3213 - protein, 574 aa, Homo sapiens
MKETIQGTGSWGPEPPGPGIPPAYSSPRRERLRWPPPPKPRLKSGGGFGPDPGSGTTVPARRLPVPRPSFDASASEEEEEEEEEEDEDEEEEVAAWRLPPRWSQLGTSQRPRPSRPTHRKTCSQRRRRAMRAFRMLLYSKSTSLTFHWKLWGRHRGRRRGLAHPKNHLSPQQGGATPQVPSPCCRFDSPRGPPPPRLGLLGALMAEDGVRGSPPVPSGPPMEEDGLRWTPKSPLDPDSGLLSCTLPNGFGGQSGPEGERSLAPPDASILISNVCSIGDHVAQELFQGSDLGMAEEAERPGEKAGQHSPLREEHVTCVQSILDEFLQTYGSLIPLSTDEVVEKLEDIFQQEFSTPSRKGLVLQLIQSYQRMPGNAMVRGFRVAYKRHVLTMDDLGTLYGQNWLNDQVMNMYGDLVMDTVPEKVHFFNSFFYDKLRTKGYDGVKRWTKNVDIFNKELLLIPIHLEVHWSLISVDVRRRTITYFDSQRTLNRRCPKHIAKYLQAEAVKKDRLDFHQGWKGYFKMNVARQNNDSDCGAFVLQYCKHLALSQPFSFTQQDMPKLRRQIYKELCHCKLTV

SEQ ID NO: 3214 - protein, 414 aa, Homo sapiens
MASGDTLYIATDGSEMPAEIVELHEIEVETIPVETIETTVVGEEEEEDDDDEDGGGGDHGGGGGHGHAGHHHHHHHHHHHPPMIALQPLVTDDPTQVHHHQEVILVQTREEVVGGDDSDGLRAEDGFEDQILIPVPAPAGGDDDYIEQTLVTVAAAGKSGGGGSSSSGGGRVKKGGGKKSGKKSYLSGGAGAAGGGGADPGNKKWEQKQVQIKTLEGEFSVTMWSSDEKKDIDHETVVEEQIIGENSPPDYSEYMTGKKLPPGGIPGIDLSDPKQLAEFARMKPRKIKEDDAPRTIACPHKGCTKMFRDNSAMRKHLHTHGPRVHVCAECGKAFVESSKLKRHQLVHTGEKPFQCTFEGCGKRFSLDFNLRTHVRIHTGDRPYVCPFDGCNKKFAQSTNLKSHILTHAKAKNNQ

SEQ ID NO: 3215 - protein, 395 aa, Homo sapiens
MDFNMKKLASDAGIFFTRAVQFTEEKFGQAEKTELDAHFENLLARADSTKNWTEKILRQTEVLLQPNPSARVEEFLYEKLDRKVPSRVTNGELLAQYMADAASELGPTTPYGKTLIKVAEAEKQLGAAERDFIHTASISFLTPLRNFLEGDWKTISKERRLLQNRRLDLDACKARLKKAKAAEAKATTVPDFQETRPRNYILSASASALWNDEVDKAEQELRVAQTEFDRQAEVTRLLLEGISSTHVNHLRCLHEFVKSQTTYYAQCYRHMLDLQKQLGRFPGTFVGTTEPASPPLSSTSPTTAAATMPVVPSVASLAPPGEASLCLEEVAPPASGTRKARVLYDYEAADSSELALLADELITVYSLPGMDPDWLIGERGNKKGKVPVTYLELLS

SEQ ID NO: 3216 - protein, 474 aa, Homo sapiens
MAEGEDVGWWRSWLQQSYQAVKEKSSEALEFMKRDLTEFTQVVQHDTACTIAATASVVKEKLAIAACSRGACFLCPFSIQTEGSSGATEKMKKGLSDFLGVISDTFAPSPDKTIDCDVITLMGTPSGTAEPYDGTKARLYSLQSDPATYCNEPDGPPELFDAWLSQFCLEEKKGEISELLVGSPSIRALYTKMVPAAVSHSEFWHRYFYKVHQLEQEQARRDALKQRAEQSISEEPGWEEEEEELMGISPISPKEAKVPVAKISTFPEGEPGPQSPCEENLVTSVEPPAEVTPSESSESISLVTQIANPATAPEARVLPKDLSQKLLEASLEEQGLAVDVGETGPSPPIHSKPLTPAGHTGGPEPRPPARVETLREEAPTDLRVFELNSDSGKSTPSNNGKKGSSTDISEDWEKDFDLDMTEEEVQMALSKVDASGEVSGPGGSEGSEPNGPGCESSPQPAQLSPQEGPCSCLR

SEQ ID NO: 3217 - protein, 1165 aa, Homo sapiens
MPNSVLWAVDLFGRVYTLSTAGQYWEMCKDSQLEFKRVSATTQCCWGIACDNQVYVYVCASDVPIRRREEAYENQRWNPMGGFCEKLLLSDRWGWSDVSGLQHRPLDRVALPSPHWEWESDWYVDENFGGEPTEKGGWTYAIDFPATYTKDKKWNSCVRRRKWIRYRRYKSRDIWAKIPSKDDPKELPDPFNDLSVGGWEITEEPVGRLSVWAVSLQGKVWYREDVSHSNPEGSSWSLLDTPGEVVQISCGPHDLLWATLWEGQALVREGINRSNPKGSSWSIVEPPGSENGVMHISVGVSVVWAVTKDWKVWFRRGVNSHNPCGTSWIEMVGEMTMVNVGMNDQVWGIGCEDRAVYFRQGVTPSELSGKTWKAIIAARECDRSHSGSSSSLLSAGCFFGDEVRGSGESAPSDTDASSEVERPGPGQILPAEPLDDSKNATGNSASGLGAGRTAEDTVEDACPAEGSREARPNTHPGPAPTPAELPWTNIDLKEAKKVPSHSAAGFPETTSLSSLGLLPLGLEEPYGVDDHPLWAWVSGGGCVVEACAMPRWFTVQAGLSSSVHMLSLSITPAQTAAWRKQIFQQLTERTKRELENFRHYEQAVEQSVWVKTGALQWWCDWKPHKWVDVRLALEQFTGHDGVRDSILFIYYVVHEEKKYIHIFLNEVVALVPVLNETKHSFALYTPERTRQRWPVRLAAATEQDMNDWLALLSLSCCESRKVQGRPSPQAIWSITCKGDIFVSEPSPDLEAHEHPLPCDQMFWRQMGGHLRMVEANSRGVVWGIGYDHTAWVYTGGYGGGCFQGLASSTSNIYTQSDVKCVHIYENQRWNPVTGYTSRGLPTDRYMWSDASGLQECTKAGTKPPSLQWAWVSDWFVDFSVPGGTDQEGWQYASDFPASYHGSKTMKDFVRRRCWARKCKLVTSGPWLEVPPIALRDVSIIPESPGAEGSGHSIALWAVSDKGDVLCRLGVSELNPAGSSWLHVGTDQPFASISIGACYQVWAVARDGSAFYRGSVYPSQPAGDCWYHIPSPPRQRLKQVSAGQTSVYALDENGNLWYRQGITPSYPQGSSWEHVSNNVCRVSVGPLDQVWVIANKVQGSHSLSRGTVCHRTGVQPHEPKGHGWDYGIGGGWDHISVRANATRAPRSSSQEQEPSAPPEAHGPVCC

SEQ ID NO: 3218 - protein, 539 aa, Homo sapiens
MGHCRLCHGKFSSRSLRSISERAPGASMERPSAEERVLVRDFQRLLGVAVRQDPTLSPFVCKSCHAQFYQCHSLLKSFLQRVNASPAGRRKPCAKVGAQPPTGAEEGACLVDLITSSPQCLHGLVGWVHGHAASCGALPHLQRTLSSEYCGVIQVVWGCDQGHDYTMDTSSSCKAFLLDSALAVKWPWDKETAPRLPQHRGWNPGDAPQTSQGRGTGTPVGAETKTLPSTDVAQPPSDSDAVGPRSGFPPQPSLPLCRAPGQLGEKQLPSSTSDDRVKDEFSDLSEGDVLSEDENDKKQNAQSSDESFEPYPERKVSGKKSESKEAKKSEEPRIRKKPGPKPGWKKKLRCEREELPTIYKCPYQGCTAVYRGADGMKKHIKEHHEEVRERPCPHPGCNKVFMIDRYLQRHVKLIHTEVRNYICDECGQTFKQRKHLLVHQMRHSGAKPLQCEVCGFQCRQRASLKYHMTKHKAETELDFACDQCGRRFEKAHNLNVHMSMVHPLTQTQDKALPLEAEPPPGPPSPSVTTEGQAVKPEPT

SEQ ID NO: 3219 - protein, 399 aa, Homo sapiens
MKMRFLGLVVCLVLWTLHSEGSGGKLTAVDPETNMNVSEIISYWGFPSEEYLVETEDGYILCLNRIPHGRKNHSDKGPKPVVFLQHGLLADSSNWVTNLANSSLGFILADAGFDVWMGNSRGNTWSRKHKTLSVSQDEFWAFSYDEMAKYDLPASINFILNKTGQEQVYYVGHSQGTTIGFIAFSQIPELAKRIKMFFALGPVASVAFCTSPMAKLGRLPDHLIKDLFGDKEFLPQSAFLKWLGTHVCTHVILKELCGNLCFLLCGFNERNLNMSRVDVYTTHSPAGTSVQNMLHWSQAVKFQKFQAFDWGSSAKNYFHYNQSYPPTYNVKDMLVPTAVWSGGHDWLADVYDVNILLTQITNLVFHESIPEWEHLDFIWGLDAPWRLYNKIINLMRKYQ

SEQ ID NO: 3220 - protein, 485 aa, Homo sapiens
MALPPFFGQGRPGPPPPQPPPPAPFGCPPPPLPSPAFPPPLPQRPGPFPGASAPFLQPPLALQPRASAEASRGGGGAGAFYPVPPPPLPPPPPQCRPFPGTDAGERPRPPPPGPGPPWSPRWPEAPPPPADVLGDAALQRLRDRQWLEAVFGTPRRAGCPVPQRTHAGPSLGEVRARLLRALRLVRRLRGLSQALREAEADGAAWVLLYSQTAPLRAELAERLQPLTQAAYVGEARRRLERVRRRRLRLRERAREREAEREAEAARAVEREQEIDRWRVKCVQEVEEKKREQELKAAADGVLSEVRKKQADTKRMVDILRALEKLRKLRKEAAARKGVCPPASADETFTHHLQRLRKLIKKRSELYEAEERALRVMLEGEQEEERKRELEKKQRKEKEKILLQKREIESKLFGDPDEFPLAHLLEPFRQYYLQAEHSLPALIQIRHDWDQYLVPSDHPKGNFVPQGWVLPPLPSNDIWATAVKLH

SEQ ID NO: 3221 - protein, 432 aa, Homo sapiens
MSELKDCPLQFHDFKSVDHLKVCPRYTAVLARSEDDGIGIEELDTLQLELETLLSSASRRLRVLEAETQILTDWQDKKGDRRFLKLGRDHELGAPPKHGKPKKQKLEGKAGHGPGPGPGRPKSKNLQPKIQEYEFTDDPIDVPRIPKNDAPNRFWASVEPYCADITSEEVRTLEELLKPPEDEAEHYKIPPLGKHYSQRWAQEDLLEEQKDGARAAAVADKKKGLMGPLTELDTKDVDALLKKSEAQHEQPEDGCPFGALTQRLLQALVEENIISPMEDSPIPDMSGKESGADGASTSPRNQNKPFSVPHTKSLESRIKEELIAQGLLESEDRPAEDSEDEVLAELRKRQAELKALSAHNRTKKHDLLRLAKEEVSRQELRQRVRMADNEVMDAFRKIMAARQKKRTPTKKEKDQAWKTLKERESILKLLDG

SEQ ID NO: 3222 - protein, 369 aa, Homo sapiens
MSELKDCPLQFHDFKSVDHLKVCPRYTAVLARSEDDGIGIEELDTLQLELETLLSSASRRLRVLEAETQILTDWQDKKGDRRFLKLGRDHELGAPPKHGKPKKQKLEGKAGHGPGPGPGRPKSKNLQPKIQEYEFTDDPIDVPRIPKNDAPNRFWASVEPYCADITSEEVRTLEELLKPPEDEAEHYKIPPLGKHYSQRWAQEDLLEEQKDGARAAAVADKKKGLMGPLTELDTKDVDALLKKSEAQHEQPEDGCPFGALTQRLLQALVEENIISPMEDSPIPDMSGKESGADGASTSPRNQNKPFSVPHTKSLESRIKEELIAQGLLESEDRPAEDSEDEVLAELRKRQAELKALSAHNRTKKHDLLR

SEQ ID NO: 3223 - protein, 369 aa, Homo sapiens; identical to SEQ ID NO: 3222

SEQ ID NO: 3224 - protein, 367 aa, Homo sapiens
MDKEYVGFAALPNQLHRKSVKKGFDFTLMVAGESGLGKSTLINSLFLTNLYEDRQVPEASARLTQTLAIERRGVEIEEGGVKVKLTLVDTPGFGDSVDCSDCWLPVVKFIEEQFEQYLRDESGLNRKNIQDSRVHCCLYFISPFGRGLRPLDVAFLRAVHEKVNIIPVIGKADALMPQETQALKQKIRDQLKEEEIHIYQFPECDSDEDEDFKRQDAEMKESIPFAVVGSCEVVRDGGNRPVRGRRYSWGTVEVENPHHCDFLNLRRMLVQTHLQDLKEVTHDLLYEGYRARCLQSLARPGARDRASRSKLSRQSATEIPLPMLPLADTEKLIREKDEELRRMQEMLEKMQAQMQQSQAQGEQSDAL

SEQ ID NO: 3225 - protein, 773 aa, Homo sapiens
MAECGASGSGSSGDSLDKSITLPPDEIFRNLENAKRFAIDIGGSLTKLAYYSTVQHKVAKVRSFDHSGKDTEREHEPPYEISVQEEITARLHFIKFENTYIEACLDFIKDHLVNTETKVIQATGGGAYKFKDLIEEKLRLKVDKEDVMTCLIKGCNFVLKNIPHEAFVYQKDSDPEFRFQTNHPHIFPYLLVNIGSGVSIVKVETEDRFEWVGGSSIGGGTFWGLGALLTKTKKFDELLHLASRGQHSNVDMLVRDVYGGAHQTLGLSGNLIASSFGKSATADQEFSKEDMAKSLLHMISNDIGQLACLHARLHSLDRVYFGGFFIRGHPVTMRTITYSINFFSKGEVQALFLRHEGYLGAIGAFLKGAEQDNPNQYSWGENYAGSSGLMSASPELGPAQRARSGTFDLLEMDRLERPLVDLPLLLDPPSYVPDTVDLTDDALARKYWLTCFEEALDGVVKRAVASQPDSVDAAERAEKFRQKYWNKLQTLRQQPFAYGTLTVRSLLDTREHCLNEFNFPDPYSKVKQRENGVALRCFPGVVRSLDALGWEERQLALVKGLLAGNVFDWGAKAVSAVLESDPYFGFEEAKRKLQERPWLVDSYSEWLQRLKGPPHKCALIFADNSGIDIILGVFPFVRELLLRGTEVILACNSGPALNDVTHSESLIVAERIAGMDPVVHSALQEERLLLVQTGSSSPCLDLSRLDKGLAALVRERGADLVVIEGMGRAVHTNYHAALRCESLKLAVIKNAWLAERLGGRLFSVIFKYEVPAE

SEQ ID NO: 3226 - protein, 315 aa, Homo sapiens
MPELLVFPAQTDLHEHPLYRAGHLILQDRASCLPAMLLDPRQAPMSWMPVPPQAIKTSHLAALLKNQGKIFAFDLDARRLASMATLLAWAGVSCCELAEEDFLAVSPLDPRYREVHYVLLDPSCSGSGMPSRQLEEPGAGTPSPVRLHALAGFQQRALCHALTFPSLQRLVYSMCSLCQEENEDMVQDALQQNPGAFRLAPALPARPHRGLSTFPGAEHCLRASPKTTLSGGFFVAVIERVEMPTSASQAKASAPERTPSPAPKRKKRAKSCSRCLHTALHIAEAPGSLLPGGKGRCLSSPWKTLGPHRRQQFAF

SEQ ID NO: 3227 - protein, 315 aa, Homo sapiens; identical to SEQ ID NO: 3226

SEQ ID NO: 3228 - protein, 291 aa, Homo sapiens
MPELLVFPAQTDLHEHPLYRAGHLILQDRASCLPAMLLDPRQAPMSWMPVPPQAIKTSHLAALLKNQGKIFAFDLDARRLASMATLLAWAGVSCCELAEEDFLAVSPLDPRYREVHYVLLDPSCSGSGMPSRQLEEPGAGTPSPRLVYSMCSLCQEENEDMVQDALQQNPGAFRLAPALPARPHRGLSTFPGAEHCLRASPKTTLSGGFFVAVIERVEMPTSASQAKASAPERTPSPAPKRKKRAKSCSRCLHTALHIAEAPGSLLPGGKGRCLSSPWKTLGPHRRQQFAF

SEQ ID NO: 3229 - protein, 226 aa, Homo sapiens
MPGGPGVLQALPATIFLLFLLSAVYLGPGCQALWMHKVPASLMVSLGEDAHFQCPHNSSNNANVTWWRVLHGNYTWPPEFLGPGEDPNGTLIIQNVNKSHGGIYVCRVQEGNESYQQSCGTYLRVRQPPPRPFLDMGEGTKNRIITAEGIILLFCAVVPGTLLLFRKRWQNEKLGLDAGDEYEDENLYEGLNLDDCSMYEDISRGLQGTYQDVGSLNIGDVQLEKP

SEQ ID NO: 3230 - protein, 188 aa, Homo sapiens
MPGGPGVLQALPATIFLLFLLSAVYLGPGCQALWMHKVPASLMVSLGEDAHFQCPHNSSNNANVTWWRVLHGNYTWPPEFLGPGEDPNEPPPRPFLDMGEGTKNRIITAEGIILLFCAVVPGTLLLFRKRWQNEKLGLDAGDEYEDENLYEGLNLDDCSMYEDISRGLQGTYQDVGSLNIGDVQLEKP

SEQ ID NO: 3231 - protein, 227 aa, Homo sapiens
MGGTTSTRRVTFEADENENITVVKGIRLSENVIDRMKESSPSGSKSQRYSGAYGASVSDEELKRRVAEELALEQAKKESEDQKRLKQAKELDRERAAANEQLTRAILRERICSEEERAKAKHLARQLEEKDRVLKKQDAFYKEQLARLEERSSEFYRVTTEQYQKAAEEVEAKFKRYESHPVCADLQAKILQCYRENTHQTLKCSALATQYMHCVNHAKQSMLEKGG

SEQ ID NO: 3232 - protein, 325 aa, Homo sapiens
MSAQAQMRALLDQLMGTARDGDETRQRVKFTDDRVCKSHLLDCCPHDILAGTRMDLGECTKIHDLALRADYEIASKERDLFFELDAMDHLESFIAECDRRTELAKKRLAETQEEISAEVSAKAEKVHELNEEIGKLLAKAEQLGAEGNVDESQKILMEVEKVRAKKKEAEEEYRNSMPASSFQQQKLRVCEVCSAYLGLHDNDRRLADHFGGKLHLGFIQIREKLDQLRKTVAEKQEKRNQDRLRRREEREREERLSRRSGSRTRDRRRSRSRDRRRRRSRSTSRERRKLSRSRSRDRHRRHRSRSRSHSRGHRRASRDRSAKYK

SEQ ID NO: 3233 - protein, 371 aa, Homo sapiens
MSAQAQMRALLDQLMGTARDGDETRQRVKFTDDRVCKSHLLDCCPHDILAGTRMDLGECTKIHDLALRADYEIASKERDLFFELDAMDHLESFIAECDRRTELAKKRLAETQEEISAEVSAKAEKVHELNEEIGKLLAKAEQLGAEGNVDESQKILMEVEKVRAKKKEAEEEYRNSMPASSFQQQKLRVCEVCSAYLGLHDNDRRLADHFGGKLHLGFIQIREKLDQLRKTVAEKQEKRNQDRLRRREEREREERLSRRSGSRTRDRRRSRSRDRRRRRSRSTSRERRKLSRSRSRDRHRRHRSRSRSHSRGHRRASRDRSAKYKFSRERASREESWESGRSERGPPDWRLESSNGKMASRRSEEKEAGEI

SEQ ID NO: 3234 - protein, 131 aa, Homo sapiens
MAPSLWKGLVGIGLFALAHAAFSAAQHRSYMRLTEKEDESLPIDIVLQTLLAFAVTCYGIVHIAGEFKDMDATSELKNKTFDTLRNHPSFYVFNHRGRVLFRPSDTANSSNQDALSSNTSLKLRKLESLRR

SEQ ID NO: 3235 - protein, 476 aa, Homo sapiens
MELPSGPGPERLFDSHRLPGDCFLLLVLLLYAPVGFCLLVLRLFLGIHVFLVSCALPDSVLRRFVVRTMCAVLGLVARQEDSGLRDHSVRVLISNHVTPFDHNIVNLLTTCSTVSESEAESATGRFPGAQLKAPLSPLAFRMEDTEALPLTPILYPTCQFFFFIFLNIFLLAFSSPGSQPLLNSPPSFVCWSRGFMEMNGRGELVESLKRFCASTRLPPTPLLLFPEEEATNGREGLLRFSSWPFSIQDVVQPLTLQVQRPLVSVTVSDASWVSELLWSLFVPFTVYQVRWLRPVHRQLGEANEEFALRVQQLVAKELGQTGTRLTPADKAEHMKRQRHPRLRPQSAQSSFPPSPGPSPDVQLATLAQRVKEVLPHVPLGVIQRDLAKTGCVDLTITNLLEGAVAFMPEDITKGTQSLPTASASKFPSSGPVTPQPTALTFAKSSWARQESLQERKQALYEYARRRFTERRAQEAD

SEQ ID NO: 3236 - protein, 410 aa, Homo sapiens
MELPSGPGPERLFDSHRLPGDCFLLLVLLLYAPVGFCLLVLRLFLGIHVFLVSCALPDSVLRRFVVRTMCAVLGLVARQEDSGLRDHSVRVLISNHVTPFDHNIVNLLTTCSTPLLNSPPSFVCWSRGFMEMNGRGELVESLKRFCASTRLPPTPLLLFPEEEATNGREGLLRFSSWPFSIQDVVQPLTLQVQRPLVSVTVSDASWVSELLWSLFVPFTVYQVRWLRPVHRQLGEANEEFALRVQQLVAKELGQTGTRLTPADKAEHMKRQRHPRLRPQSAQSSFPPSPGPSPDVQLATLAQRVKEVLPHVPLGVIQRDLAKTGCVDLTITNLLEGAVAFMPEDITKGTQSLPTASASKFPSSGPVTPQPTALTFAKSSWARQESLQERKQALYEYARRRFTERRAQEAD

SEQ ID NO: 3237 - protein, 373 aa, Homo sapiens
MELPSGPGPERLFDSHRLPGDCFLLLVLLLYAPVGFCLLVLRLFLGIHVFLVSCALPDSVLRRFVVRTMCAVLGLVARQEDSGLRDHSVRVLISNHVTPFDHNIVNLLTTCSTPLLNSPPSFVCWSRGFMEMNGRGELVESLKRFCASTRLPPTPLLLFPEEEATNGREGLLRFSSWPFSIQDVVQPLTLQVQRPLVSVTVSDASWVSELLWSLFVPFTVYQVRWLRPVHRQLGEANEEFALRVQQLVAKELGQTGTRLTPADKAEHMKRQRHPRLRPQSAQSSFPPSPGPSPDVQLATLAQRVKEVLPHVPLGVIQRDLAKTGCVDLTITNLLEGAVAFMPEDITKGTQSLPTASASKAFDACLMMMTPQAL

SEQ ID NO: 3238 - protein, 719 aa, Homo sapiens
MALKDYALEKEKVKKFLQEFYQDDELGKKQFKYGNQLVRLAHREQVALYVDLDDVAEDDPELVDSICENARRYAKLFADAVQELLPQYKEREVVNKDVLDVYIEHRLMMEQRSRDPGMVRSPQNQYPAELMRRFELYFQGPSSNKPRVIREVRADSVGKLVTVRGIVTRVSEVKPKMVVATYTCDQCGAETYQPIQSPTFMPLIMCPSQECQTNRSGGRLYLQTRGSRFIKFQEMKMQEHSDQVPVGNIPRSITVLVEGENTRIAQPGDHVSVTGIFLPILRTGFRQVVQGLLSETYLEAHRIVKMNKSEDDESGAGELTREELRQIAEEDFYEKLAASIAPEIYGHEDVKKALLLLLVGGVDQSPRGMKIRGNINICLMGDPGVAKSQLLSYIDRLAPRSQYTTGRGSSGVGLTAAVLRDSVSGELTLEGGALVLADQGVCCIDEFDKMAEADRTAIHEVMEQQTISIAKAGILTTLNARCSILAAANPAYGRYNPRRSLEQNIQLPAALLSRFDLLWLIQDRPDRDNDLRLAQHITYVHQHSRQPPSQFEPLDMKLMRRYIAMCREKQPMVPESLADYITAAYVEMRREAWASKDATYTSARTLLAILRLSTALARLRMVDVVEKEDVNEAIRLMEMSKDSLLGDKGQTARTQRPADVIFATVRELVSGGRSVRFSEAEQRCVSRGFTPAQFQAALDEYEELNVWQVNASRTRITFV

SEQ ID NO: 3239 - protein, 543 aa, Homo sapiens
MVVATYTCDQCGAETYQPIQSPTFMPLIMCPSQECQTNRSGGRLYLQTRGSRFIKFQEMKMQEHSDQVPVGNIPRSITVLVEGENTRIAQPGDHVSVTGIFLPILRTGFRQVVQGLLSETYLEAHRIVKMNKSEDDESGAGELTREELRQIAEEDFYEKLAASIAPEIYGHEDVKKALLLLLVGGVDQSPRGMKIRGNINICLMGDPGVAKSQLLSYIDRLAPRSQYTTGRGSSGVGLTAAVLRDSVSGELTLEGGALVLADQGVCCIDEFDKMAEADRTAIHEVMEQQTISIAKAGILTTLNARCSILAAANPAYGRYNPRRSLEQNIQLPAALLSRFDLLWLIQDRPDRDNDLRLAQHITYVHQHSRQPPSQFEPLDMKLMRRYIAMCREKQPMVPESLADYITAAYVEMRREAWASKDATYTSARTLLAILRLSTALARLRMVDVVEKEDVNEAIRLMEMSKDSLLGDKGQTARTQRPADVIFATVRELVSGGRSVRFSEAEQRCVSRGFTPAQFQAALDEYEELNVWQVNASRTRITFV

SEQ ID NO: 3240 - protein, 226 aa, Homo sapiens
MAAAAAAAGAAGSAAPAAAAGAPGSGGAPSGSQGVLIGDRLYSGVLITLENCLLPDDKLRFTPSMSSGLDTDTETDLRVVGCELIQAAGILLRLPQVAMATGQVLFQRFFYTKSFVKHSMEHVSMACVHLASKIEEAPRRIRDVINVFHRLRQLRDKKKPVPLLLDQDYVNLKNQIIKAERRVLKELGFCVHVKHPHKIIVMYLQVLECERNQHLVQTSWVASEGK

SEQ ID NO: 3241 - protein, 520 aa, Homo sapiens
MAAAAAAAGAAGSAAPAAAAGAPGSGGAPSGSQGVLIGDRLYSGVLITLENCLLPDDKLRFTPSMSSGLDTDTETDLRVVGCELIQAAGILLRLPQVAMATGQVLFQRFFYTKSFVKHSMEHVSMACVHLASKIEEAPRRIRDVINVFHRLRQLRDKKKPVPLLLDQDYVNLKNQIIKAERRVLKELGFCVHVKHPHKIIVMYLQVLECERNQHLVQTSWNYMNDSLRTDVFVRFQPESIACACIYLAARTLEIPLPNRPHWFLLFGATEEEIQEICLKILQLYARKKVDLTHLEGEVEKRKHAIEEAKAQARGLLPGGTQVLDGTSGFSPAPKLVESPKEGKGSKPSPLSVKNTKRRLEGAKKAKADSPVNGLPKGRESRSRSRSREQSYSRSPSRSASPKRRKSDSGSTSGGSKSQSRSRSRSDSPPRQAPRSAPYKGSEIRGSRKSKDCKYPQKPHKSRSRSSSRSRSRSRERADNPGKYKKKSHYYRDQRRERSRSYERTGRRYERDHPGHSRHRR

SEQ ID NO: 3242 - protein, 422 aa, Homo sapiens
MAPWPPKGLVPAVLWGLSLFLNLPGPIWLQPSPPPQSSPPPQPHPCHTCRGLVDSFNKGLERTIRDNFGGGNTAWEEENLSKYKDSETRLVEVLEGVCSKSDFECHRLLELSEELVESWWFHKQQEAPDLFQWLCSDSLKLCCPAGTFGPSCLPCPGGTERPCGGYGQCEGEGTRGGSGHCDCQAGYGGEACGQCGLGYFEAERNASHLVCSACFGPCARCSGPEESNCLQCKKGWALHHLKCVDIDECGTEGANCGADQFCVNTEGSYECRDCAKACLGCMGAGPGRCKKCSPGYQQVGSKCLDVDECETEVCPGENKQCENTEGGYRCICAEGYKQMEGICVKEQIPGAFPILTDLTPETTRRWKLGSHPHSTYVKMKMQRDEATFPGLYGKQVAKLGSQSRQSDRGTRLIHSQQASSQR

SEQ ID NO: 3243 - protein, 420 aa, Homo sapiens
MAPWPPKGLVPAVLWGLSLFLNLPGPIWLQPSPPPQSSPPPQPHPCHTCRGLVDSFNKGLERTIRDNFGGGNTAWEEENLSKYKDSETRLVEVLEGVCSKSDFECHRLLELSEELVESWWFHKQQEAPDLFQWLCSDSLKLCCPAGTFGPSCLPCPGGTERPCGGYGQCEGEGTRGGSGHCDCQAGYGGEACGQCGLGYFEAERNASHLVCSACFGPCARCSGPEESNCLQCKKGWALHHLKCVDIDECGTEGANCGADQFCVNTEGSYECRDCAKACLGCMGAGPGRCKKCSPGYQQVGSKCLDVDECETEVCPGENKQCENTEGGYRCICAEGYKQMEGICVKEQIPESAGFFSEMTEDELVVLQQMFFGIIICALATLAAKGDLVFTAIFIGAVAAMTGYWLSERSDRVLEGFIKGR

SEQ ID NO: 3244 - protein, 1411 aa, Homo sapiens
MSLSSGASGGKGVDANPVETYDSGDEWDIGVGNLIIDLDADLEKDQQKLEMSGSKEVGIPAPNAVATLPDNIKFVTPVPGPQGKEGKSKSKRSKSGKDTSKPTPGTSLFTPSEGAASKKEVQGRSGDGANAGGLVAAIAPKGSEKAAKASRSVAGSKKEKENSSSKSKKERSEGVGTCSEKDPGVLQPVPLGGRGGQYDGSAGVDTGAVEPLGSIAIEPGAALNPLGTKPEPEEGENECRLLKKVKSEKMESPVSTPAVLPIHLLVPVVNNDISSPCEQIMVRTRSVGVNTCDVALATEPECLGPCEPGTSVNLEGIVWQETEDGMLVVNVTWRNKTYVGTLLDCTRHDWAPPRFCDSPTSDLEMRNGRGRGKRMRPNSNTPVNETATASDSKGTSNSSKTRAGANSKGRRGSQNSSEHRPPASSTSEDVKASPSSANKRKNKPLSDMELNSSSEDSKGSKRVRTNSMGSATGPLPGTKVEPTVLDRNCPSPVLIDCPHPNCNKKYKHINGLKYHQAHAHTDDDSKPEADGDSEYGEEPILHADLGSCNGASVSQKGSLSPARSATPKVRLVEPHSPSPSSKFSTKGLCKKKLSGEGDTDLGALSNDGSDDGPSVMDETSNDAFDSLERKCMEKEKCKKPSSLKPEKIPSKSLKSARPIAPAIPPQQIYTFQTATFTAASPGSSSGLTATVAQAMPNSPQLKPIQPKPTVMGEPFTVNPALTPAKDKKKKDKKKKESSKELESPLTPGKVCRAEEGKSPFRESSGDGMKMEGLLNGSSDPHQSRLASIKAEADKIYSFTDNAPSPSIGGSSRLENTTPTQPLTPLHVVTQNGAEASSVKTNSPAYSDISDAGEDGEGKVDSVKSKDAEQLVKEGAKKTLFPPQPQSKDSPYYQGFESYYSPSYAQSSPGALNPSSQAGVESQALKTKRDEEPESIEGKVKNDICEEKKPELSSSSQQPSVIQQRPNMYMQSLYYNQYAYVPPYGYSDQSYHTHLLSTNTAYRQQYEEQQKRQSLEQQQRGVDKKAEMGLKEREAALKEEWKQKPSIPPTLTKAPSLTDLVKSGPGKAKEPGADPAKSVIIPKLDDSSKLPGQAPEGLKVKLSDASHLSKEASEAKTGAECGRQAEMDPILWYRQEAEPRMWTYVYPAKYSDIKSEDERWKEERDRKLKEERSRSKDSVPKEDGKESTSSDCKLPTSEESRLGSKEPRPSVHVPVSSPLTQHQSYIPYMHGYSYSQSYDPNHPSYRSMPAVMMQNYPGSYLPSSYSFSPYGSKVSGGEDADKARASPSVTCKSSSESKALDILQQHASHYKSKSPTISDKTSQERDRGGCGVVGGGGSCSSVGGASGGERSVDRPRTSPSQRLMSTHHHHHHLGYSLLPAQYNLPYAAGLSSTAIVASQQGSTPSLYPPPRR

SEQ ID NO: 3245 - protein, 805 aa, Homo sapiens
MAQPLAFILDVPETPGDQGQGPSPYDESEVHDSFQQLIQEQSQCTAQEGLELQQREREVTGSSQQTLWRPEGTQSTATLRILASMPSRTIGRSRGAIISQYYNRTVQLRCRSSRPLLGNFVRSAWPSLRLYDLELDPTALEEEEKQSLLVKEFQSLAVAQRDHMLRGMPLSLAEKRSLREKSRTPRGKWRGQPGSGGVCSCCGRLRYACVLALHSLGLALLSALQALMPWRYALKRIGGQFGSSVLSYFLFLKTLLAFNALLLLLLVAFIMGPQVAFPPALPGPAPVCTGLELLTGAGCFTHTVMYYGHYSNATLNQPCGSPLDGSQCTPRVGGLPYNMPLAYLSTVGVSFFITCITLVYSMAHSFGESYRVGSTSGIHAITVFCSWDYKVTQKRASRLQQDNIRTRLKELLAEWQLRHSPRSVCGRLRQAAVLGLVWLLCLGTALGCAVAVHVFSEFMIQSPEAAGQEAVLLVLPLVVGLLNLGAPYLCRVLAALEPHDSPVLEVYVAICRNLILKLAILGTLCYHWLGRRVGVLQGQCWEDFVGQELYRFLVMDFVLMLLDTLFGELVWRIISEKKLKRRRKPEFDIARNVLELIYGQTLTWLGVLFSPLLPAVQIIKLLLVFYVKKTSLLANCQAPRRPWLASHMSTVFLTLLCFPAFLGAAVFLCYAVWQVKPSSTCGPFRTLDTMYEAGRVWVRHLEAAGPRVSWLPWVHRYLMENTFFVFLVSALLLAVIYLNIQVVRGQRKVICLLKEQISNEGEDKIFLINKLHSIYERKEREERSRVGTTEEAAAPPALLTDEQDA

SEQ ID NO: 3246 - protein, 1012 aa, Homo sapiens
MAEAALEAVRSELREFPAAARELCVPLAVPYLDKPPTPLHFYRDWVCPNRPCIIRNALQHWPALQKWSLPYFRATVGSTEVSVAVTPDGYADAVRGDRFMMPAERRLPLSFVLDVLEGRAQHPGVLYVQKQCSNLPSELPQLLPDLESHVPWASEALGKMPDAVNFWLGEAAAVTSLHKDHYENLYCVVSGEKHFLFHPPSDRPFIPYELYTPATYQLTEEGTFKVVDEEAMEKAEVSRTCLLTVRVLQAHRLPSKDLVTPSDCYVTLWLPTACSHRLQTRTVKNSSSPVWNQSFHFRIHRQLKNVMELKVFDQDLVTGDDPVLSVLFDAGTLRAGEFRRESFSLSPQGEGRLEVEFRLQSLADRGEWLVSNGVLVARELSCLHVQLEETGDQKSSEHRVQLVVPGSCEGPQEASVGTGTFRFHCPACWEQELSIRLQDAPEEQLKAPLSALPSGQVVRLVFPTSQEPLMRVELKKEAGLRELAVRLGFGPCAEEQAFLSRRKQVVAAALRQALQLDGDLQEDEIPVVAIMATGGGIRAMTSLYGQLAGLKELGLLDCVSYITGASGSTWALANLYEDPEWSQKDLAGPTELLKTQVTKNKLGVLAPSQLQRYRQELAERARLGYPSCFTNLWALINEALLHDEPHDHKLSDQREALSHGQNPLPIYCALNTKGQSLTTFEFGEWCEFSPYEVGFPKYGAFIPSELFGSEFFMGQLMKRLPESRICFLEGIWSNLYAANLQDSLYWASEPSQFWDRWVRNQANLDKEQVPLLKIEEPPSTAGRIAEFFTDLLTWRPLAQATHNFLRGLHFHKDYFQHPHFSTWKATTLDGLPNQLTPSEPHLCLLDVGYLINTSCLPLLQPTRDVDLILSLDYNLHGAFQQLQLLGRFCQEQGIPFPPISPSPEEQLQPRECHTFSDPTCPGAPAVLHFPLVSDSFREYSAPGVRRTPEEAAAGEVNLSSSDSPYHYTKVTYSQEDVDKLLHLTHYNVCNNQEQLLEALRQAVQRRRQRRPH

SEQ ID NO: 3247 - protein, 547 aa, Homo sapiens
MEVGGDTAAPAPGGAEDLEDTQFPSEEAREGGGVHAVPPDPEDEGLEETGSKDKDQPPSPSPPPQSEALSSTSRLWSPAAPENSPTCSPESSSGGQGGDPSDEEWRSQRKHVFVLSEAGKPIYSRYGSVEALSATMGVMTALVSFVQSAGDAIRAIYAEDHKLVFLQQGPLLLVAMSRTSQSAAQLRGELLAVHAQIVSTLTRASVARIFAHKQNYDLRRLLAGSERTLDRLLDSMEQDPGALLLGAVRCVPLARPLRDALGALLRRCTAPGLALSVLAVGGRLITAAQERNVLAECRLDPADLQLLLDWVGAPAFAAGEAWAPVCLPRFNPDGFFYAYVARLDAMPVCLLLLGTQREAFHAMAACRRLVEDGMHALGAMRALGEAASFSNASSASAPAYSVQAVGAPGLRHFLYKPLDIPDHHRQLPQFTSPELEAPYSREEERQRLSDLYHRLHARLHSTSRPLRLIYHVAEKETLLAWVTSKFELYTCLSPLVTKAGAILVVTKLLRWVKKEEDRLFIRYPPKYSTPPATSTDQAAHNGLFTGL

SEQ ID NO: 3248 - protein, 164 aa, Homo sapiens
MMKEFSSTAQGNTEVIHTGTLQRHESHHIRDFCFQEIEKDIHNFEFQWQEEERNGHEAPMTEIKELTGSTDRHDQRHAGNKPIKDQLGSSFHSHLPELHIFQPEWKIGNQVEKSIINASLILTSQRISCSPKTRISNNYGNNSLHSSLPIQKLGSTHERKIFPM

SEQ ID NO: 3249 - protein, 377 aa, Homo sapiens
MEAAAVTVTRSATRRRRRQLQGLAAPEAGTQEEQEDQEPRPRRRRPGRSIKDEEEETVFREVVSFSPDPLPVRYYDKDTTKPISFYLSSLEELLAWKPRLEDGFNVALEPLACRQPPLSSQRPRTLLCHDMMGGYLDDRFIQGSVVQTPYALYHWQCIDVFVYFSHHTVTIPPVGWTNTAHRHGVCVLGTFITEWNEGGRLCEAFLAGDERSYQAVADRLVQITQFFRFDGWLINIENSLSLAAVGNMPPFLRYLTTQLHRQVPGGLVLWYDSVVQSGQLKWQDELNQHNRVFFDSCDGFFTNYNWREEHLERMLGQAGERRADVYVGVDVFARGNVVGGRFDTDKSLELIRKHGFSVALFAPSCSVFPGVGNLLCC

SEQ ID NO: 3250 - protein, 860 aa, Homo sapiens
MEIGSAGPAGAQPLLMVPRRPGYGTMGKPIKLLANCFQVEIPKIDVYLYEVDIKPDKCPRRVNREVVDSMVQHFKVTIFGDRRPVYDGKRSLYTANPLPVATTGVDLDVTLPGEGGKDRPFKVSIKFVSRVSWHLLHEVLTGRTLPEPLELDKPISTNPVHAVDVVLRHLPSMKYTPVGRSFFSAPEGYDHPLGGGREVWFGFHQSVRPAMWKMMLNIDVSATAFYKAQPVIQFMCEVLDIHNIDEQPRPLTDSHRVKFTKEIKGLKVEVTHCGTMRRKYRVCNVTRRPASHQTFPLQLENGQTVERTVAQYFREKYTLQLKYPHLPCLQVGQEQKHTYLPLEVCNIVAGQRCIKKLTDNQTSTMIKATARSAPDRQEEISRLVRSANYETDPFVQEFQFKVRDEMAHVTGRVLPAPMLQYGGRNRTVATPSHGVWDMRGKQFHTGVEIKMWAIACFATQRQCREEILKGFTDQLRKISKDAGMPIQGQPCFCKYAQGADSVEPMFRHLKNTYSGLQLIIVILPGKTPVYAEVKRVGDTLLGMATQCVQVKNVIKTSPQTLSNLCLKINVKLGGINNILVPHQRPSVFQQPVIFLGADVTHPPAGDGKKPSIAAVVGSMDAHPSRYCATVRVQRPRQEIIQDLASMVRELLIQFYKSTRFKPTRIIFYRDGVSEGQFRQVLYYELLAIREACISLEKDYQPGITYIVVQKRHHTRLFCADRTERVGRSGNIPAGTTVDTDITHPYEFDFYLCSHAGIQGTSRPSHYHVLWDDNCFTADELQLLTYQLCHTYVRCTRSVSIPAPAYYAHLVAFRARYHLVDKEHDSAEGSHVSGQSNGRDPQALAKAVQIHQDTLRTMYFA

SEQ ID NO: 3251 - protein, 626 aa, Homo sapiens
MCEVLDIHNIDEQPRPLTDSHRVKFTKEIKGLKVEVTHCGTMRRKYRVCNVTRRPASHQTFPLQLENGQTVERTVAQYFREKYTLQLKYPHLPCLQVGQEQKHTYLPLEVCNIVAGQRCIKKLTDNQTSTMIKATARSAPDRQEEISRLVRSANYETDPFVQEFQFKVRDEMAHVTGRVLPAPMLQYGGRNRTVATPSHGVWDMRGKQFHTGVEIKMWAIACFATQRQCREEILKGFTDQLRKISKDAGMPIQGQPCFCKYAQGADSVEPMFRHLKNTYSGLQLIIVILPGKTPVYAEVKRVGDTLLGMATQCVQVKNVIKTSPQTLSNLCLKINVKLGGINNILVPHQRPSVFQQPVIFLGADVTHPPAGDGKKPSIAAVVGSMDAHPSRYCATVRVQRPRQEIIQDLASMVRELLIQFYKSTRFKPTRIIFYRDGVSEGQFRQVLYYELLAIREACISLEKDYQPGITYIVVQKRHHTRLFCADRTERVGRSGNIPAGTTVDTDITHPYEFDFYLCSHAGIQGTSRPSHYHVLWDDNCFTADELQLLTYQLCHTYVRCTRSVSIPAPAYYAHLVAFRARYHLVDKEHDSAEGSHVSGQSNGRDPQALAKAVQIHQDTLRTMYFA

SEQ ID NO: 3252 - protein, 573 aa, Homo sapiens
MANAEVSVPVGDVVVVPTEGNEGENPEDTKTQVILQLQPVQQGLFIDGHFYNRIYEAGSENNTAVVAVETHTIHKIEEGIDTGTIEANEDMEIAYPITCGESKAILLWKKFVCPGINVKCVKFNDQLISPKHFVHLAGKSTLKDWKRAIRLGGIMLRKMMDSGQIDFYQHDKVCSNTCRSTKFDLLISSARAPVPGQQTSVVQTPTSADGSITQIAISEESMEEAGLEWNSALTAAVTMATEEGVKKDSEEISEDTLMFWKGIADVGLMEEVVCNIQKEIEELLRGVQQRLIQAPFQVTDAAVLNNVAHTFGLMDTVKKVLDNRRNQVEQGEEQFLYTLTDLERQLEEQKKQGQDHRLKSQTVQNVVLMPVSTPKPPKRPRLQRPASTTVLSPSPPVQQPQFTVISPITITPVGQSFSMGNIPVATLSQGSSPVTVHTLPSGPQLFRYATVVSSAKSSSPDTVTIHPSSSLALLSSTAMQDGSTLGNMTTMVSPVELVAMESGLTSAIQAVESTSEDGQTIIEIDPAPDPEAEDTEGKAVILETELRTEEKVVAEMEEHQHQVHNVEIVVLED

SEQ ID NO: 3253 - protein, 563 aa, Homo sapiens
MANAEVSVPVGDVVVVPTEGNEGENPEDTKTQVILQLQPVQQGIYEAGSENNTAVVAVETHTIHKIEEGIDTGTIEANEDMEIAYPITCGESKAILLWKKFVCPGINVKCVKFNDQLISPKHFVHLAGKSTLKDWKRAIRLGGIMLRKMMDSGQIDFYQHDKVCSNTCRSTKFDLLISSARAPVPGQQTSVVQTPTSADGSITQIAISEESMEEAGLEWNSALTAAVTMATEEGVKKDSEEISEDTLMFWKGIADVGLMEEVVCNIQKEIEELLRGVQQRLIQAPFQVTDAAVLNNVAHTFGLMDTVKKVLDNRRNQVEQGEEQFLYTLTDLERQLEEQKKQGQDHRLKSQTVQNVVLMPVSTPKPPKRPRLQRPASTTVLSPSPPVQQPQFTVISPITITPVGQSFSMGNIPVATLSQGSSPVTVHTLPSGPQLFRYATVVSSAKSSSPDTVTIHPSSSLALLSSTAMQDGSTLGNMTTMVSPVELVAMESGLTSAIQAVESTSEDGQTIIEIDPAPDPEAEDTEGKAVILETELRTEEKVVAEMEEHQHQVHNVEIVVLED

SEQ ID NO: 3254 - protein, 671 aa, Homo sapiens
MNGAPSPEDGASPSSPPLPPPPPPSWREFCESHARAAALDFARRFRLYLASHPQYAGPGAEAAFSRRFAELFLQHFEAEVARASGSLSPPILAPLSPGAEISPHDLSLESCRVGGPLAVLGPSRSSEDLAGPLPSSVSSSSTTSSKPKLKKRFSLRSVGRSVRGSVRGILQWRGTVDPPSSAGPLETSSGPPVLGGNSNSNSSGGAGTVGRGLVSDGTSPGERWTHRFERLRLSRGGGALKDGAGMVQREELLSFMGAEEAAPDPAGVGRGGGVAGPPSGGGGQPQWQKCRLLLRSEGEGGGGSRLEFFVPPKASRPRLSIPCSSITDVRTTTALEMPDRENTFVVKVEGPSEYIMETVDAQHVKAWVSDIQECLSPGPCPATSPRPMTLPLAPGTSFLTRENTDSLELSCLNHSESLPSQDLLLGPSESNDRLSQGAYGGLSDRPSASISPSSASIAASHFDSMELLPPELPPRIPIEEGPPAGTVHPLSAPYPPLDTPETATGSFLFQGEPEGGEGDQPLSGYPWFHGMLSRLKAAQLVLTGGTGSHGVFLVRQSETRRGEYVLTFNFQGKAKHLRLSLNEEGQCRVQHLWFQSIFDMLEHFRVHPIPLESGGSSDVVLVSYVPSSQRQQGREQAGSHAGVCEGDGCHPDASCTLMPFGASDCVTDHLP

SEQ ID NO: 3255 - protein, 197 aa, Homo sapiens
MADKVLKEKRKLFIHSMGEGTINGLLDELLQTRVLNQEEMEKVKRENATVMDKTRALIDSVIPKGAQACQICITYICEEDSYLAETLGLSAALQAVQDNPAMPTCSSPEGRIKLCFLEDAQRIWKQKLQRCHVQNTIIKWSERYTSGSFEMQWLFLRTNFIERFWRNILLLPLHKGSLYPRIPGLGKELQTGTHKLS

SEQ ID NO: 3256 - protein, 97 aa, Homo sapiens
MADKVLKEKRKLFIHSMGEGTINGLLDELLQTRVLNQEEMEKVKRENATVMDKTRALIDSVIPKGAQACQICITYICEEDSYLAETLGLSAGPIPGN

SEQ ID NO: 3257 - protein, 154 aa, Homo sapiens
MADDLDFETGDAGASATFPMQCSALRKNGFVVLKGRPCKIVEMSTSKTGKHGHAKVHLVGIDIFTGKKYEDICPSTHNMDVPNIKRNDFQLIGIQDGYLSLLQDSGEVREDLRLPEGDLGKEIEQKYDCGEEILITVLSAMTEEAAVAIKAMAK

SEQ ID NO: 3258 - protein, 858 aa, Homo sapiens
MMPGPRPRKGPQARGQGVAAAKQMGLFMEFGPEDMLLGMDEAEDDEDLEAELLALTGEAQTTGKKPAPKGQAPLPMAHIEKLAADCMRDVEEEEEEEGLEEDAELLTELQEVLGVDEETEPLDGDEVADPGGSEEENGLEDTEPPVQTAVLTASAPAAQAGASQGLHALLEERIHNYREAAASAKEAGEAAKARRCERGLKTLESQLASVRRGRKINEDEIPPPVALGKRPLAPQEPANRSPETDPPAPPALESDNPSQPETSLPGISAQPVSDLDPDPRALLSSRQREYKVAALSAKRAGELDRARELMRIGKRFGAVLEALEKGQPVDLSAMPPAPEDLKPQQASQAPTAPSVIPPAVERVQPVMAPDVPATPVAPTESQTVLDALQQRLNKYREAGIQARSGGDERKARMHERIAKQYQDAIRAHRAGRKVNFAELPVPPGFPPIPGLESTMGVEEDAVAATLAAAEKLASAEDSAPADKDEDEPPGHLQGEPPAQAPVAKKPARPTVPSSQRLPEPRASSSKESPSPSVREQLALLEARKLQYQRAALQAKRSQDLEQAKAYLRVAKWLEAQIIQARSGRPVDLSKVPSPLTDEEGDFILIHHEDLRLSQKAEEVYAQLQKMLLEQQEKCLLFSKQFMHQGNVAETTRFEKLAQDRKKQLEILQLAQAQGLDPPTHHFELKTFQTVRIFSELNSTEMHLIIVRGMNLPAPPGVTPDDLDAFVRFEFHYPNSDQAQKSKTAVVKNTNSPEFDQLFKLNINRNHRGFKRVIQSKGIKFEIFHKGSFFRSDKLVGTAHLKLERLENECEIREIVEVLDGRKPTGGKLEVKVRLREPLSGQDVQMVTENWLVLEPRGL

SEQ ID NO: 3259 - protein, 198 aa, Homo sapiens
MATAEPSGRALRLSTPGPRPSGARDRAPGAAGPPSGQIGNRALRLGERTPAAVEKRGPYMVTRAPSIQAKLQKHRDLAKAVLRRKGMLGASPNRPDSSGKRSVKFNKGYTALSQSPDENLVSLDSDSDGELGSRYSSGYSSAEQVNQDVSRQLLQDGYHLDEIPDDEDLDLIPPKPMASSTCSCCWCCLGDSSSCTLQ

SEQ ID NO: 3260 - protein, 1087 aa, Homo sapiens
MARSSPYLRQLQGPLLPPRDLVEEDDDYLNDDVEEDEESVFIDAEELCSGGVKAGSLPGCLRVSICDENTQETCKVFGRFPITGAWWRVKVQVKPVVGSRSYQYQVQGFPSYFLQSDMSPPNQKHICALFLKECEVSSDDVNKFLTWVKEVSNYKNLNFENLRETLRTFHKETGRKDQKQPTQNGQEELFLDNEMSLPLENTIPFRNVMTALQFPKIMEFLPVLLPRHFKWIIGSGSKEMLKEIEEILGTHPWKLGFSKITYREWKLLRCEASWIAFCQCESLLQLMTDLEKNALIMYSRLKQICREDGHTYVEVNDLTLTLSNHMSFHAASESLKFLKDIGVVTYEKSCVFPYDLYHAERAIAFSICDLMKKPPWHLCVDVEKVLASIHTTKPENSSDDALNESKPDEVRLENPVDVVDTQDNGDHIWTNGENEINAEISEVQLDQDQVEVPLDRDQVAALEMICSNPVTVISGKGGCGKTTIVSRLFKHIEQLEEREVKKACEDFEQDQNASEEWITFTEQSQLEADKAIEVLLTAPTGKAAGLLRQKTGLHAYTLCQVNYSFYSWTQTMMTTNKPWKFSSVRVLVVDEGSLVSVGIFKSVLNLLCEHSKLSKLIILGDIRQLPSIEPGNLLKDLFETLKSRNCAIELKTNHRAESQLIVDNATRISRRQFPKFDAELNISDNPTLPISIQDKTFIFVRLPEEDASSQSSKTNHHSCLYSAVKTLLQENNLQNAKTSQFIAFRRQDCDLINDCCCKHYTGHLTKDHQSRLVFGIGDKICCTRNAYLSDLLPENISGSQQNNDLDASSEDFSGTLPDFAKNKRDFESNVRLCNGEIFFITNDVTDVTFGKRRSLTINNMAGLEVTVDFKKLMKYCRIKHAWARTIHTFQGSEEQTVVYVVGKAGRQHWQHVYTAVTRGRCRVYVIAEESQLRNAIMKNSFPRKTRLKHFLQSKLSSSGAPPADFPSPRKSSGDSGGPSTPSASPLPVVTDHAMTNDVTWSEASSPDERTLTFAERWQLSSPDGVDTDDDLPKSRASKRTCGVNDDESPSKIFMVGESPQVSSRLQNLRLNNLIPRQLFKPTDNQET

SEQ ID NO: 3261 - protein, 510 aa, Homo sapiens
MLPLEKAFASPRSSPAPPDLPTPGSAAGVQQEEPETIPERTPADLEFSRLRFREFVYQEAAGPHQTLARLHELCRQWLMPEARSKEQMLELLVLEQFLGILPDKVRPWVVAQYPESCKKAASLVEGLADVLEEPGMLLGSPAGSSSILSDGVYERHMDPLLLPGELASPSQALGAGEIPAPSETPWLSPDPLFLEQRRVREAKTEEDGPANTEQKLKSFPEDPQHLGEWGHLDPAEENLKSYRKLLLWGYQLSQPDAASRLDTEELRLVERDPQGSSLPEGGRRQESAGCACEEAAPAGVLPELPTEAPPGDALADPPSGTTEEEEEQPGKAPDPQDPQDAESDSATGSQRQSVIQQPAPDRGTAKLGTKRPHPEDGDEQSLEGVSSSGDSAGLEAGQGPGADEPGLSRGKPYACGECGEAFAWLSHLMEHHSSHGGRKRYACQGCWKTFHFSLALAEHQKTHEKEKSYALGGARGPQPSTREAQAGARAGGPPESVEGEAPPAPPEAQR

SEQ ID NO: 3262 - protein, 1239 aa, Homo sapiens
MELPNYSRQLLQQLYTLCKEQQFCDCTISIGTIYFRAHKLVLAAASLLFKTLLDNTDTISIDASVVSPEEFALLLEMMYTGKLPVGKHNFSKIISLADSLQMFDVAVSCKNLLTSLVNCSVQGQVVRDVSAPSSETFRKEPEKPQVEILSSEGAGEPHSSPELAATPGGPVKAETEEAAHSVSQEMSVNSPTAQESQRNAETPAETPTTAEACSPSPAVQTFSEAKKTSTEPGCERKHYQLNFLLENEGVFSDALMVTQDVLKKLEMCSEIKGPQKEMIVKCFEGEGGHSAFQRILGKVREESLDVQTVVSLLRLYQYSNPAVKTALLDRKPEDVDTVQPKGSTEEGKTLSVLLLEHKEDLIQCVTQLRPIMESLETAKEEFLTGTEKRVILNCCEGRTPKETIENLLHRMTEEKTLTAEGLVKLLQAVKTTFPNLGLLLEKLQKSATLPSTTVQPSPDDYGTELLRRYHENLSEIFTDNQILLKMISHMTSLAPGEREVMEKLVKRDSGSGGFNSLISAVLEKQTLSATAIWQLLLVVQETKTCPLDLLMEEIRREPGADAFFRAVTTPEHATLETILRHNQLILEAIQQKIECKLFTSEEEHLAETVKEILSIPSETASPEASLRAVLSRAMEKSVPAIEICHLLCSVHKSFPGLQPVMQELAYIGVLTKEDGEKETWKVSNKFHLEANNKEDEKAAKEDSQPGEQNDQGETGSLPGQQEKEASASPDPAKKSFICKACDKSFHFYCRLKVHMKRCRVAKSKQVQCKECSETKDSKKELDKHQLEAHGAGGEPDAPKKKKKRLPVTCDLCGREFAHASGMQYHKLTEHFDEKPFSCEECGAKFAANSTLKNHLRLHTGDRPFMCKHCLMTFTQASALAYHTKKKHSEGKMYACQYCDAVFAQSIELSRHVRTHTGDKPYVCRDCGKGFRQANGLSIHLHTFHNIEDPYDCKKCRMSFPTLQDHRKHIHEVHSKEYHPCPTCGKIFSAPSMLERHMVTHVGGKPFSCGICNKAYQQLSGLWYHNRTHHPDVFAAQNHRSSKFSSLQCSSCDKTFPNTIEHKKHIKAEHADMKFHECDQCKELFPTPALLQVHVKCQHSGSQPFRCLYCAATFRFPGALQHHVTTEHFKQSETTFPCELCGELFTSQAQLDSHLESEHPKVMSTETQAAASQMAQVIQTPEPVAPTEQVITLEETQLAGSQVFVTLPDSQASQASSELVAVTVEDLLDGTVTLICGEAK

SEQ ID NO: 3263 - protein, 707 aa, Homo sapiens
MDPGWGQRDVGWAALLILFAASLLTVFAWLLQYARGLWLARARGDRGPGPALAGEPAGSLRELGVWRSLLRLRATRAGAAEEPGVRGLLASLFAFKSFRENWQRAWVRALNEQACRNGSSIQIAFEEVPQLPPRASISHVTCVDQSEHTMVLRCQLSAEEVRFPVSVTQQSPAAVSMETYHVTLTLPPTQLEVNLEEIPGEGLLISWAFTDRPDLSLTVLPKLQARERGEEQVELSTIEELIKDAIVSTQPAMMVNLRACSAPGGLVPSEKPPMMPQAQPAIPRPNRLFLRQLRASHLGNELEGTEELCCVAELDNPMQQKWTKPARAGSEVEWTEDLALDLGPQSRELTLKVLRSSSCGDTELLGQATLPVGSPSRPLSRRQLCPLTPGPGKALGPAATMAVELHYEEGSPRNLGTPTSSTPRPSITPTKKIELDRTIMPDGTIVTTVTTVQSRPRIDGKLDSPSRSPSKVEVTEKTTTVLSESSGPSNTSHSSSPGDSHLSNGLDPVAETAIRQLTEPSGRVAKKTPTKRSTLIISGVSKVPIAQDELALSLGYAASLEASVQDDAGTSGGPSSPPSDPPAMSPGPLDALSSPTSVQEADETTRSDISERPSVDDIESETGSTGALETRSLKDHKVSFLRSGTKLIFRRRPRQKEAGLSQSHDDLSNATATPSVRKKAGSFSRRLIKRFSFKSKPKANGNPSPQL

SEQ ID NO: 3264 - protein, 756 aa, Homo sapiens
MVVTRSARAKASIQAASAESSGQKSFAANGIQAHPESSTGSDARTTAESQTTGKQSLIPRTPKARKRKSRTTGSLPKGTEPSTDGETSEAESNYSVSEHHDTILRVTRRRQILIACSPVSSVRKKPKVTPTKESYTEEIVSEAESHVSGISRIVLPTEKTTGARRSKAKSLTDPSQESHTEAISDAETSSSDISFSGIATRRTRSMQRKLKAQTEKKDSKIVPGNEKQIVGTPVNSEDSDTRQTSHLQARSLSEINKPNFYNNDFDDDFSHRSSENILTVHEQANVESLKETKQNCKDLDEDANGITDEGKEINEKSSQLKNLSELQDTSLQQLVSQRHSTPQNKNAVSVHSNLNSEAVMKSLTQTFATVEVGRWNNNKKSPIKASDLTKFGDCGGSDDEEESTVISVSEDMNSEGNVDFECDTKLYTSAPNTSQGKDNSVLLVLSSDESQQSENSENEEDTLCFVENSGQRESLSGDTGSLSCDNALFVIDTTPGMSADKNFYLEEEDKASEVAIEEEKEEEEDEKSEEDSSDHDENEDEFSDEEDFLNSTKAKLLKLTSSSIDPGLSIKQLGGLYINFNADKLQSNKRTLTQIKEKKKNELLQKAVITPDFEKNHCVPPYSESKYQLQKKRRKERQKTAGDGWFGMKAPEMTNELKNDLKALKMRASMDPKRFYKKNDRDGFPKYFQIGTIVDNPADFYHSRIPKKQRKRTIVEELLADSEFRRYNRRKYSEIMAEKAANAAGKKFRKKKKFRN

SEQ ID NO: 3265 - protein, 669 aa, Homo sapiens
  MOD_RES 667: Xaa = Selenocysteine
MAVYRAALGASLAAARLLPLGRCSPSPAPRSTLSGAAMEPAPRWLAGLRFDNRALRALPVEAPPPGPEGAPSAPRPVPGACFTRVQPTPLRQPRLVALSEPALALLGLGAPPAREAEAEAALFFSGNALLPGAEPAAHCYCGHQFGQFAGQLGDGAAMYLGEVCTATGERWELQLKGAGPTPFSRQADGRKVLRSSIREFLCSEAMFHLGVPTTRAGACVTSESTVVRDVFYDGNPKYEQCTVVLRVASTFIRFGSFEIFKSADEHTGRAGPSVGRNDIRVQLLDYVISSFYPEIQAAHASDSVQRNAAFFREVTRRTARMVAEWQCVGFCHGVLNTDNMSILGLTIDYGPFGFLDRYDPDHVCNASDNTGRYAYSKQPEVCRWNLRKLAEALQPELPLELGEAILAEEFDAEFQRHYLQKMRRKLGLVQVELEEDGALVSKLLETMHLTGADFTNTFYLLSSFPVELESPGLAEFLARLMEQCASLEELRLAFRPQMDPRQLSMMLMLAQSNPQLFALMGTRAGIARELERVEQQSRLEQLSAAELQSRNQGHWADWLQAYRARLDKDLEGAGDAAAWQAEHVRVMHANNPKYVLRNYIAQNAIEAAERGDFSEVRRVLKLLETPYHCEAGAATDAEATEADGADGRQRSYSSKPPLWAAELCVTXSS

SEQ ID NO: 3266 - protein, 892 aa, Homo sapiens
MTDPFCVGGRRLPGSSKSGPGKDGSRKEVRLPMLHDPPKMGMPVVRGGQTVPGQAPLCFDPGSPASDKTEGKKKGRPKAENQALRDIPLSLMNDWKDEFKAHSRVKCPNSGCWLEFPSIYGLKYHYQRCQGGAISDRLAFPCPFCEAAFTSKTQLEKHRIWNHMDRPLPASKPGPISRPVTISRPVGVSKPIGVSKPVTIGKPVGVSKPIGISKPVSVGRPMPVTKAIPVTRPVPVTKPVTVSRPMPVTKAMPVTKPITVTKSVPVTKPVPVTKPITVTKLVTVTKPVPVTKPVTVSRPIVVSKPVTVSRPIAISRHTPPCKMVLLTRSENKAPRATGRNSGKKRAADSLDTCPIPPKQARPENGEYGPSSMGQSSAFQLSADTSSGSLSPGSRPSGGMEALKAAGPASPPEEDPERTKHRRKQKTPKKFTGEQPSISGTFGLKGLVKAEDKARVHRSKKQEGPGPEDARKKVPAAPITVSKEAPAPVAHPAPGGPEEQWQRAIHERGEAVCPTCNVVTRKTLVGLKKHMEVCQKLQDALKCQHCRKQFKSKAGLNYHTMAEHSAKPSDAEASEGGEQEERERLRKVLKQMGRLRCPQEGCGAAFSSLMGYQYHQRRCGKPPCEVDSPSFPCTHCGKTYRSKAGHDYHVRSEHTAPPPEEPTDKSPEAEDPLGVERTPSGRVRRTSAQVAVFHLQEIAEDELARDWTKRRMKDDLVPETARLNYTRPGLPTLNPQLLEAWKNEVKEKGHVNCPNDCCEAIYSSVSGLKAHLASCSKGAHLAGKYRCLLCPKEFSSESGVKYHILKTHAENWFRTSADPPPKHRSQDSLVPKKEKKKNLAGGKKRGRKPKERTPEEPVAKLPPRRDDWPPGCRDKGARGSTGRKVGVSKAPEK

SEQ ID NO: 3267 - protein, 1256 aa, Homo sapiens
MPGPRGAAGGLAPEMRGAGAAGLLALLLLLLLLLLGLGGRVEGGPAGERGAGGGGALARERFKVVFAPVICKRTCLKGQCRDSCQQGSNMTLIGENGHSTDTLTGSGFRVVVCPLPCMNGGQCSSRNQCLCPPDFTGRFCQVPAGGAGGGTGGSGPGLSRTGALSTGALPPLAPEGDSVASKHAIYAVQVIADPPGPGEGPPAQHAAFLVPLGPGQISAEVQAPPPVVNVRVHHPPEASVQVHRIESSNAESAAPSQHLLPHPKPSHPRPPTQKPLGRCFQDTLPKQPCGSNPLPGLTKQEDCCGSIGTAWGQSKCHKCPQLQYTGVQKPGPVRGEVGADCPQGYKRLNSTHCQDINECAMPGVCRHGDCLNNPGSYRCVCPPGHSLGPSRTQCIADKPEEKSLCFRLVSPEHQCQHPLTTRLTRQLCCCSVGKAWGARCQRCPTDGTAAFKEICPAGKGYHILTSHQTLTIQGESDFSLFLHPDGPPKPQQLPESPSQAPPPEDTEEERGVTTDSPVSEERSVQQSHPTATTTPARPYPELISRPSPPTMRWFLPDLPPSRSAVEIAPTQVTETDECRLNQNICGHGECVPGPPDYSCHCNPGYRSHPQHRYCVDVNECEAEPCGPGRGICMNTGGSYNCHCNRGYRLHVGAGGRSCVDLNECAKPHLCGDGGFCINFPGHYKCNCYPGYRLKASRPPVCEDIDECRDPSSCPDGKCENKPGSFKCIACQPGYRSQGGGACRDVNECAEGSPCSPGWCENLPGSFRCTCAQGYAPAPDGRSCLDVDECEAGDVCDNGICSNTPGSFQCQCLSGYHLSRDRSHCEDIDECDFPAACIGGDCINTNGSYRCLCPQGHRLVGGRKCQDIDECSQDPSLCLPHGACKNLQGSYVCVCDEGFTPTQDQHGCEEVEQPHHKKECYLNFDDTVFCDSVLATNVTQQECCCSLGAGWGDHCEIYPCPVYSSAEFHSLCPDGKGYTQDNNIVNYGIPAHRDIDECMLFGSEICKEGKCVNTQPGYECYCKQGFYYDGNLLECVDVDECLDESNCRNGVCENTRGGYRCACTPPAEYSPAQRQCLSPEEMERAPERRDVCWSQRGEDGMCAGPLAGPALTFDDCCCRQGRGWGAQCRPCPPRGAGSHCPTSQSESNSFWDTSPLLLGKPPRDEDSSEEDSDECRCVSGRCVPRPGGAVCECPGGFQLDASRARCVDIDECRELNQRGLLCKSERCVNTSGSFRCVCKAGFARSRPHGACVPQRRR

SEQ ID NO: 3268 - protein, 161 aa, Homo sapiens
MGSKAKKRVLLPTRPAPPTVEQILEDVRGAPAEDPVFTILAPEDPPVPFRMMEDAEAPGEQLYQQSRAYVAANQRLQQAGNVPRLPPQADLSGPAGLGSAQGGLHPGFPWGSVGPRLAFTGSQPTWVLTQAPLLMLGLRFIRRLIHAELVGPTQLAPSCVT

SEQ ID NO: 3269 - protein, 737 aa, Homo sapiens
MPLNRTLSMSSLPGLEDWEDEFDLENAVLFEVAWEVANKVGGIYTVLQTKAKVTGDEWGDNYFLVGPYTEQGVRTQVELLEAPTPALKRTLDSMNSKGCKVYFGRWLIEGGPLVVLLDVGASAWALERWKGELWDTCNIGVPWYDREANDAVLFGFLTTWFLGEFLAQSEEKPHVVAHFHEWLAGVGLCLCRARRLPVATIFTTHATLLGRYLCAGAVDFYNNLENFNVDKEAGERQIYHRYCMERAAAHCAHVFTTVSQITAIEAQHLLKRKPDIVTPNGLNVKKFSAMHEFQNLHAQSKARIQEFVRGHFYGHLDFNLDKTLYFFIAGRYEFSNKGADVFLEALARLNYLLRVNGSEQTVVAFFIMPARTNNFNVETLKGQAVRKQLWDTANTVKEKFGRKLYESLLVGSLPDMNKMLDKEDFTMMKRAIFATQRQSFPPVCTHNMLDDSSDPILTTIRRIGLFNSSADRVKVIFHPEFLSSTSPLLPVDYEEFVRGCHLGVFPSYYEPWGYTPAECTVMGIPSISTNLSGFGCFMEEHIADPSAYGIYILDRRFRSLDDSCSQLTSFLYSFCQQSRRQRIIQRNRTERLSDLLDWKYLGRYYMSARHMALSKAFPEHFTYEPNEADAAQGYRYPRPASVPPSPSLSRHSSPHQSEDEEDPRNGPLEEDGERYDEDEEAAKDRRNIRAPEWPRRASCTSSTSGSKRNSVDTATSSSLSTPSEPLSPTSSLGEERN

SEQ ID NO: 3270 - protein, 452 aa, Homo sapiens
MAAPSAGSWSTFQHKELMAADRGRRILGVCGMHPHHQETLKKNRVVLAKQLLLSELLEHLLEKDIITLEMRELIQAKVGSFSQNVELLNLLPKRGPQAFDAFCEALRETKQGHLEDMLLTTLSGLQHVLPPLSCDYDLSLPFPVCESCPLYKKLRLSTDTVEHSLDNKDGPVCLQVKPCTPEFYQTHFQLAYRLQSRPRGLALVLSNVHFTGEKELEFRSGGDVDHSTLVTLFKLLGYDVHVLCDQTAQEMQEKLQNFAQLPAHRVTDSCIVALLSHGVEGAIYGVDGKLLQLQEVFQLFDNANCPSLQNKPKMFFIQACRGDETDRGVDQQDGKNHAGSPGCEESDAGKEKLPKMRLPTRSDMICGYACLKGTAAMRNTKRGSWYIEALAQVFSERACDMHVADMLVKVNALIKDREGYAPGTEFHRCKEMSEYCSTLCRHLYLFPGHPPT

SEQ ID NO: 3271 - protein, 108 aa, Homo sapiens
MAAPSAGSWSTFQHKELMAADRGRRILGVCGMHPHHQETLKKNRVVLAKQLLLSELLEHLLEKDIITLEMRELIQAKVGSFSQNVELLNLLPKRGPQAFDAFCEALHS

SEQ ID NO: 3272 - protein, 175 aa, Homo sapiens
MTDCEFGYIYRLAQDYLQCVLQIPQPGSGPSKTSRVLQNVAFSVQKEVEKNLKSCLDNVNVVSVDTARTLFNQVMEKEFEDGIINWGRIVTIFAFEGILIKKLLRQQIAPDVDTYKEISYFVAEFIMNNTGEWIRQNGGWENGFVKKFEPKSGWMTFLEVTGKICEMLSLLKQYC

SEQ ID NO: 3273 - protein, 296 aa, Homo sapiens
MLSPKDILRKDLKLVHGYPMTCAFASNWEKIEQFHSRPDDIVIATYPKSGTTWVSEIIDMILNDGDIEKCKRGFITEKVPMLEMTLPGLRTSGIEQLEKNPSPRIVKTHLPTDLLPKSFWENNCKMIYLARNAKDVSVSYYHFDLMNNLQPFPGTWEEYLEKFLTGKVAYGSWFTHVKNWWKKKEEHPILFLYYEDMKENPKEEIKKIIRFLEKNLNDEILDRIIHHTSFEVMKDNPLVNYTHLPTTVMDHSKSPFMRKGTAGDWKNYFTVAQNEKFDAIYETEMSKTALQFRTEI

SEQ ID NO: 3274 - protein, 190 aa, Homo sapiens
MASRGKTETSKLKQNLEEQLDRLMQQLQDLEECREELDTDEYEETKKETLEQLSEFNDSLKKIMSGNMTLVDELSGMQLAIQAAISQAFKTPEVIRLFAKKQPGQLRTRLAEMDRDLMVGKLERDLYTQQKVEILTALRKLGEKLTADDEAFLSANAGAILSQFEKVSTDLGSGDKILALASFEVEKTKK

SEQ ID NO: 3275 - protein, 296 aa, Homo sapiens
MAAVFDLDLETEEGSEGEGEPELSPADACPLAELRAAGLEPVGHYEEVELTETSVNVGPERIGPHCFELLRVLGKGGYGKVFQVRKVQGTNLGKIYAMKVLRKAKIVRNAKDTAHTRAERNILESVKHPFIVELAYAFQTGGKLYLILECLSGGELFTHLEREGIFLEDTACFYLAEITLALGHLHSQGIIYRDLKPENIMLSSQGHIKLTDFGLCKESIHEGAVTHTFCGTIEYMAPEILVRSGHNRAVDWWSLGALIRPSPQRTGRKPWIRSSGASWHCPPTSPQMPGTLSKSF

SEQ ID NO: 3276 - protein, 482 aa, Homo sapiens
MAAVFDLDLETEEGSEGEGEPELSPADACPLAELRAAGLEPVGHYEEVELTETSVNVGPERIGPHCFELLRVLGKGGYGKVFQVRKVQGTNLGKIYAMKVLRKAKIVRNAKDTAHTRAERNILESVKHPFIVELAYAFQTGGKLYLILECLSGGELFTHLEREGIFLEDTACFYLAEITLALGHLHSQGIIYRDLKPENIMLSSQGHIKLTDFGLCKESIHEGAVTHTFCGTIEYMAPEILVRSGHNRAVDWWSLGALMYDMLTGSPPFTAENRKKTMDKIIRGKLALPPYLTPDARDLVKKFLKRNPSQRIGGGPGDAADVQRHPFFRHMNWDDLLAWRVDPPFRPCLQSEEDVSQFDTRFTRQTPVDSPDDTALSESANQAFLGFTYVAPSVLDSIKEGFSFQPKLRSPRRLNSSPRAPVSPLKFSPFEGFRPSPSLPEPTELPLPPLLPPPPPSTTAPLPIRPPSGTKKSKRGRGRPGR

SEQ ID NO: 3277 - protein, 333 aa, Homo sapiens
MFRAAAPGQLRRAASLLRFQSTLVIAEHANDSLAPITLNTITAATRLGGEVSCLVAGTKCDKVAQDLCKVAGIAKVLVAQHDVYKGLLPEELTPLILATQKQFNYTHICAGASAFGKNLLPRVAAKLEVAPISDIIAIKSPDTFVRTIYAGNALCTVKCDEKVKVFSVRGTSFDAAATSGGSASSEKASSTSPVEISEWLDQKLTKSDRPELTGAKVVVSGGRGLKSGENFKLLYDLADQLHAAVGASRAAVDAGFVPNDMQVGQTGKIVAPELYIAVGISGAIQHLAGMKDSKTIVAINKDPEAPIFQVADYGIVADLFKVVPEMTEILKKK

SEQ ID NO: 3278 - protein, 549 aa, Homo sapiens
MRRPRGEPGPRAPRPTEGATCAGPGESWSPSPNSMLRVLLSAQTSPARLSGLLLIPPVQPCCLGPSKWGDRPVGGGPSAGPVQGLQRLLEQAKSPGELLRWLGQNPSKVRAHHYSVALRRLGQLLGSRPRPPPVEQVTLQDLSQLIIRNCPSFDIHTIHVCLHLAVLLGFPSDGPLVCALEQERRLRLPPKPPPPLQPLLRGGQGLEAALSCPRFLRYPRQHLISSLAEARPEELTPHVMVLLAQHLARHRLREPQLLEAIAHFLVVQETQLSSKVVQKLVLPFGRLNYLPLEQQFMPCLERILAREAGVAPLATVNILMSLCQLRCLPFRALHFVFSPGFINYISGTPHALIVRRYLSLLDTAVELELPGYRGPRLPRRQQVPIFPQPLITDRARCKYSHKDIVAEGLRQLLGEEKYRQDLTVPPGYCTDFLLCASSSGAVLPVRTQDPFLPYPPRSCPQGQAASSATTRDPAQRVVLVLRERWHFCRDGRVLLGSRALRERHLGLMGYQLLPLPFEELESQRGLPQLKSYLRQKLQALGLRWGPEGG

SEQ ID NO: 3279 - protein, 408 aa, Homo sapiens
MRRPRGEPGPRAPRPTEGATCAGPGESCFPSDGPLVCALEQERRLRLPPKPPPPLQPLLRGGQGLEAALSCPRFLRYPRQHLISSLAEARPEELTPHVMVLLAQHLARHRLREPQLLEAIAHFLVVQETQLSSKVVQKLVLPFGRLNYLPLEQQFMPCLERILAREAGVAPLATVNILMSLCQLRCLPFRALHFVFSPGFINYISGTPHALIVRRYLSLLDTAVELELPGYRGPRLPRRQQVPIFPQPLITDRARCKYSHKDIVAEGLRQLLGEEKYRQDLTVPPGYCTDFLLCASSSGAVLPVRTQDPFLPYPPRSCPQGQAASSATTRDPAQRVVLVLRERWHFCRDGRVLLGSRALRERHLGLMGYQLLPLPFEELESQRGLPQLKSYLRQKLQALGLRWGPEGG

SEQ ID NO: 3280 - protein, 497 aa, Homo sapiens
MTFNSFEGSKTCVPADINKEEEFVEEFNRLKTFANFPSGSPVSASTLARAGFLYTGEGDTVRCFSCHAAVDRWQYGDSAVGRHRKVSPNCRFINGFYLENSATQSTNSGIQNGQYKVENYLGSRDHFALDRPSETHADYLLRTGQVVDISDTIYPRNPAMYSEEARLKSFQNWPDYAHLTPRELASAGLYYTGIGDQVQCFCCGGKLKNWEPCDRAWSEHRRHFPNCFFVLGRNLNIRSESDAVSSDRNFPNSTNLPRNPSMADYEARIFTFGTWIYSVNKEQLARAGFYALGEGDKVKCFHCGGGLTDWKPSEDPWEQHAKWYPGCKYLLEQKGQEYINNIHLTHSLEECLVRTTEKTPSLTRRIDDTIFQNPMVQEAIRMGFSFKDIKKIMEEKIQISGSNYKSLEVLVADLVNAQKDSMQDESSQTSLQKEISTEEQLRRLQEEKLCKICMDRNIAIVFVPCGHLVTCKQCAEAVDKCPMCYTVITFKQKIFMS

SEQ ID NO: 3281 - protein, 594 aa, Homo sapiens
MGPEARRTTGRRRSCWKRNPSACGGFEVCDDMVTKDIMTPLVALLKECSAGLDSNEMSLQEKKDQNRNSIENIANETVNVLWNICECSSRAVSIFNKEGCLEIVLKYLSRFPTNVDLAISVAYCLQTVTEDNPELLKSFSATALNMLESALLSPVSSMESLLLKTLVAGTIWNLKDIIPCKSQAEIINALLKILSEVLGMDAGEMVIQMKEAETQRLKTAAEAEEILENTNGDDLIEDDEMEGISHKRRVRRKTFVSDLLPPTDKELRETIALLTAQQTALEIIVNMCCNEDPSDDEWEELSSSDESDAFMENSFSECGGQLFSPLCLSHEVHTALTNYLIPKKIFEKTAFPNSIAVDLCSRNPTWKPLIRKMNTIQCRALFCLQSLVSLLDVEHLGGAAALQTLAQHLSQLLFSQPDFAKHVDFLEAISSALRALLQTMASKNISQCMTPDQLMTLCKAGIHSSNVGVRVNVVSILGITGSVLAKEDGTLETLKNIGCFLLEVTTKDPSLVVAGEALDALFDVFADGKEAERASIQIKLLSALKEFQPVFKMKIRKEGRGNYSTDQLCVLDNVKMNLRRFIAYQETVEKRLTS

SEQ ID NO: 3282 - protein, 680 aa, Homo sapiens
MGKSRTKRFKRPQFSPTGDCQAEAAAAANGTGGEEDDGPAAELLEKLQHPSAEVRECACAGLARLVQQRPALPGLARRDAVRRLGPLLLDPSLAVRETAAGALRNLSACGGFEVCDDMVTKDIMTPLVALLKECSAGLDSNEMSLQEKKDQNRNSIENIANETVNVLWNICECSSRAVSIFNKEGCLEIVLKYLSRFPTNVDLAISVAYCLQTVTEDNPELLKSFSATALNMLESALLSPVSSMESLLLKTLVAGTIWNLKDIIPCKSQAEIINALLKILSEVLGMDAGEMVIQMKEAETQRLKTAAEAEEILENTNGDDLIEDDEMEGISHKRRVRRKTFVSDLLPPTDKELRETIALLTAQQTALEIIVNMCCNEDPSDDEWEELSSSDESDAFMENSFSECGGQLFSPLCLSHEVHTALTNYLIPKKIFEKTAFPNSIAVDLCSRNPTWKPLIRKMNTIQCRALFCLQSLVSLLDVEHLGGAAALQTLAQHLSQLLFSQPDFAKHVDFLEAISSALRALLQTMASKNISQCMTPDQLMTLCKAGIHSSNVGVRVNVVSILGITGSVLAKEDGTLETLKNIGCFLLEVTTKDPSLVVAGEALDALFDVFADGKEAERASIQIKLLSALKEFQPVFKMKIRKEGRGNYSTDQLCVLDNVKMNLRRFIAYQETVEKRLTS

SEQ ID NO: 3283 - protein, 584 aa, Homo sapiens
MAGRRLNLRWALSVLCVLLMAETVSGTRGSSTGAHISPQFPASGVNQTPVVDCRKVCGLNVSDRCDFIRTNPDCHSDGGYLDYLEGIFCHFPPSLLPLAVTLYVSWLLYLFLILGVTAAKFFCPNLSAISTTLKLSHNVAGVTFLAFGNGAPDIFSALVAFSDPHTAGLALGALFGAGVLVTTVVAGGITILHPFMAASRPFFRDIVFYMVAVFLTFLMLFRGRVTLAWALGYLGLYVFYVVTVILCTWIYQRQRRGSLFCPMPVTPEILSDSEEDRVSSNTNSYDYGDEYRPLFFYQETTAQILVRALNPLDYMKWRRKSAYWKALKVFKLPVEFLLLLTVPVVDPDKDDQNWKRPLNCLHLVISPLVVVLTLQSGTYGVYEIGGLVPVWVVVVIAGTALASVTFFATSDSQPPRLHWLFAFLGFLTSALWINAAATEVVNILRSLGVVFRLSNTVLGLTLLAWGNSIGDAFSDFTLARQGYPRMAFSACFGGIIFNILVGVGLGCLLQISRSHTEVKLEPDGLLVWVLAGALGLSLVFSLVSVPLQCFQLSRVYGFCLLLFYLNFLVVALLTEFGVIHLKSM

SEQ ID NO: 3284 - protein, 456 aa, Homo sapiens
MLEACNNNLEMAVTMFLDGGGIAEEPSTSSASVSTVRPHTEEEVRAPIPQKQEILVEPEPLFGAPKRRRPARSIFDGFRDFQTETIRQEQELRNGGAIDKKLTTLADLFRPPIDLMHKGSFETAKECGQMQNKWLMINIQNVQDFACQCLNRDVWSNEAVKNIIREHFIFWQVYHDSEEGQRYIQFYKLGDFPYVSILDPRTGQKLVEWHQLDVSSFLDQVTGFLGEHGQLDGLSSSPPKKCARSESLIDASEDSQLEAAIRASLQETHFDSTQTKQDSRSDEESESELFSGSEEFISVCGSDEEEEVENLAKSRKSPHKDLGHRKEENRRPLTEPPVRTDPGTATNHQGLPAVDSEILEMPPEKADGVVEGIDVNGPKAQLMLRYPDGKREQITLPEQAKLLALVKHVQSKGYPNERFELLTNFPRRKLSHLDYDITLQEAGLCPQETVFVQERN

SEQ ID NO: 3285 - protein, 75 aa, Homo sapiens
MAAHGGSAASSALKGLIQQFTTITEKKFVPQFLKSRKYWWNQNHYLVLLKDDGLHVQFLMVSGIFRLKLFGKNKN

SEQ ID NO: 3286 - protein, 341 aa, Homo sapiens
MHKGSFETAKECGQMQNKWLMINIQNVQDFACQCLNRDVWSNEAVKNIIREHFIFWQVYHDSEEGQRYIQFYKLGDFPYVSILDPRTGQKLVEWHQLDVSSFLDQVTGFLGEHGQLDGLSSSPPKKCARSESLIDASEDSQLEAAIRASLQETHFDSTQTKQDSRSDEESESELFSGSEEFISVCGSDEEEEVENLAKSRKSPHKDLGHRKEENRRPLTEPPVRTDPGTATNHQGLPAVDSEILEMPPEKADGVVEGIDVNGPKAQLMLRYPDGKREQITLPEQAKLLALVKHVQSKGYPNERFELLTNFPRRKLSHLDYDITLQEAGLCPQETVFVQERN

SEQ ID NO: 3287 - protein, 536 aa, Homo sapiens
MRLRRPLGTGGAGLEGRSMRLRTPHGEVGEGSPCVSVLLFGGGGGGKMAAHGGSAASSALKGLIQQFTTITGASESVGKHMLEACNNNLEMAVTMFLDGGGIAEEPSTSSASVSTVRPHTEEEVRAPIPQKQEILVEPEPLFGAPKRRRPARSIFDGFRDFQTETIRQEQELRNGGAIDKKLTTLADLFRPPIDLMHKGSFETAKECGQMQNKWLMINIQNVQDFACQCLNRDVWSNEAVKNIIREHFIFWQVYHDSEEGQRYIQFYKLGDFPYVSILDPRTGQKLVEWHQLDVSSFLDQVTGFLGEHGQLDGLSSSPPKKCARSESLIDASEDSQLEAAIRASLQETHFDSTQTKQDSRSDEESESELFSGSEEFISVCGSDEEEEVENLAKSRKSPHKDLGHRKEENRRPLTEPPVRTDPGTATNHQGLPAVDSEILEMPPEKADGVVEGIDVNGPKAQLMLRYPDGKREQITLPEQAKLLALVKHVQSKGYPNERFELLTNFPRRKLSHLDYDITLQEAGLCPQETVFVQERN

SEQ ID NO: 3288 - protein, 889 aa, Homo sapiens
MELVKAALAEALRLLRLQVPPSSLQGSGTPAPPGDSSLAAPPGLPPTCTPSLVSRGTQTETEVELKSSPGPPGLSNGPPAPQGASEEPSGTQSEGGGSSSSGAGSPGPPGILRPLQPPQRADTPRRNSSSSSSPSERPRQKLSRKAISSANLLVRSGSTESRGGKDPLSSPGGPGSRRSNYNLEGISVKMFLRGRPITMYIPSGIRSLEELPSGPPPETLSLDWVYGYRGRDSRSNLFVLRSGEVVYFIACVVVLYRPGGGPGGPGGGGQRHYRGHTDCVRCLAVHPDGVRVASGQTAGVDKDGKPLQPVVHIWDSETLLKLQEIGLGAFERGVGALAFSAADQGAFLCVVDNSNEHMLSVWDCSRGMKLAEIKSTNDSVLAVGFNPRDSSCIVTSGKSHVHFWNWSGGVGVPGNGTLTRKQGVFGKYKKPKFIPCFVFLPDGDILTGDSEGNILTWGRSPSDSKTPGRGGAKETYGIVAQAHAHEGSIFALCLRRDGTVLSGGGRDRRLVQWGPGLVALQEAEIPEHFGAVRAIAEGLGSELLVGTTKNALLRGDLAQGFSPVIQGHTDELWGLCTHPSQNRFLTCGHDRQLCLWDGESHALAWSIDLKETGLCADFHPSGAVVAVGLNTGRWLVLDTETREIVSDVIDGNEQLSVVRYSPDGLYLAIGSHDNVIYIYSVSSDGAKSSRFGRCMGHSSFITHLDWSKDGNFIMSNSGDYEILYWDVAGGCKQLKNRYESRDREWATYTCVLGFHVYVPVRSCQGAEPHVRGPRQPRDQRPIHARRLAPRLAGRQGRQHLPVASAGRWGRGAGARHALSNPLPVPRLLPRRLIAAWRDRLARRRGPAPPCPSLAQSPTTRGRLFPGLTSRHSRSRIFLEGANGAPAHTV

SEQ ID NO: 3289 - protein, 313 aa, Homo sapiens
MEAGPWRVSAPPSGPPQFPAVVPGPSLEVARAHMLALGPQQLLAQDEEGDTLLHLFAARGLRWAAYAAAEVLQVYRRLDIREHKGKTPLLVAAAANQPLIVEDLLNLGAEPNAADHQGRSVLHVAATYGLPGVLLAVLNSGVQVDLEARDFEGLTPLHTAILALNVAMRPSDLCPRVLSTQARDRLDCVHMLLQMGANHTSQEIKSNKTVLHLAVQAANPTLVQLLLELPRGDLRTFVNMKAHGNTALHMAAALPPGPAQEAIVRHLLAAGADPTLRNLENEQPVHLLRPGPGPEGLRQLLKRSRVAPPGLSS

SEQ ID NO: 3290 - protein, 946 aa, Homo sapiens
MAAHGKLRRERGLQAEYETQVKEMRWQLSEQLRCLELQGELRRELLQELAEFMRRRAEVELEYSRGLEKLAERFSSRGGRLGSSREHQSFRKEPSLLSPLHCWAVLLQHTRQQSRESAALSEVLAGPLAQRLSHIAEDVGRLVKKSRDLEQQLQDELLEVVSELQTAKKTYQAYHMESVNAEAKLREAERQEEKRAGRSVPTTTAGATEAGPLRKSSLKKGGRLVEKRQAKFMEHKLKCTKARNEYLLSLASVNAAVSNYYLHDVLDLMDCCDTGFHLALGQVLRSYTAAESRTQASQVQGLGSLEEAVEALDPPGDKAKVLEVHATVFCPPLRFDYHPHDGDEVAEICVEMELRDEILPRAQNIQSRLDRQTIETEEVNKTLKATLQALLEVVASDDGDVLDSFQTSPSTESLKSTSSDPGSRQAGRRRGQQQETETFYLTKLQEYLSGRSILAKLQAKHEKLQEALQRGDKEEQEVSWTQYTQRKFQKSRQPRPSSQYNQRLFGGDMEKFIQSSGQPVPLVVESCIRFINLNGLQHEGIFRVSGAQLRVSEIRDAFERGEDPLVEGCTAHDLDSVAGVLKLYFRSLEPPLFPPDLFGELLASSELEDTAERVEHVSRLLWRLPAPVLVVLRYLFTFLNHLAQYSDENMMDPYNLAVCFGPTLLPVPAGQDPVALQGRVNQLVQTLIVQPDRVFPPLTSLPGPVYEKCMAPPSASCLGDAQLESLGADNDPELEAEMPAQEDDLEGVVEAVACFAYTGRTAQELSFRRGDVLRLHERASSDWWRGEHNGMRGLIPHKYITLPAGTEKQVVGAGLQTAGESGSSPEGLLASELVHRPEPCTSPEAMGPSGHRRRCLVPASPEQHVEVDKAVAQNMDSVFKELLGKTSVRQGLGPASTTSPSPGPRSPKAPPSSRLGRNKGFSRGPGAPASPSASHPQGLDTTPKPH

SEQ ID NO: 3291 - protein, 338 aa, Homo sapiens
MELWGRMLWALLSGPGRRGSTRGWAFSSWQPQPPLAGLSSAIELVSHWTGVFEKRGIPEARESSEYIVAHVLGAKTFQSLRPALWTQPLTSQQLQCIRELSSRRLQRMPVQYILGEWDFQGLSLRMVPPVFIPRPETEELVEWVLEEVAQRSHAVGSPGSPLILEVGCGSGAISLSLLSQLPQSRVIAVDKREAAISLTHENAQRLRLQDRIWIIHLDMTSERSWTHLPWGPMDLIVSNPPYVFHQDMEQLAPEIRSYEDPAALDGGEEGMDIITHILALAPRLLKDSGSIFLEVDPRHPELVSSWLQSRPDLYLNLVAVRRDFCGRPRFLHIRRSGP

SEQ ID NO: 3292 - protein, 283 aa, Homo sapiens
MEPPGDWGPPPWRSTPKTDVLRLVLYLTFLGAPCYAPALPSCKEDEYPVGSECCPKCSPGYRVKEACGELTGTVCEPCPPGTYIAHLNGLSKCLQCQMCDPAMGLRASRNCSRTENAVCGCSPGHFCIVQDGDHCAACRAYATSSPGQRVQKGGTESQDTLCQNCPPGTFSPNGTLEECQHQTKCSWLVTKAGAGTSSSHWVWWFLSGSLVIVIVCSTVGLIICVKRRKPRGDVVKVIVSVQRKRQEAEGEATVIEALQAPPDVTTVAVEETIPSFTGRSPNH

SEQ ID NO: 3293 - protein, 211 aa, Homo sapiens
MRLFLWNAVLTLFVTSLIGALIPEPEVKIEVLQKPFICHRKTKGGDLMLVHYEGYLEKDGSLFHSTHKHNNGQPIWFTLGILEALKGWDQGLKGMCVGEKRKLIIPPALGYGKEGKGKIPPESTLIFNIDLLEIRNGPRSHESFQEMDLNDDWKLSKDEVKAYLKKEFEKHGAVVNESHHDALVEDIFDKEDEDKDGFISAREFTYKHDEL

SEQ ID NO: 3294 - protein, 323 aa, Homo sapiens
MYHNSSQKRHWTFSSEEQLARLRADANRKFRCKAVANGKVLPNDPVFLEPHEEMTLCKYYEKRLLEFCSVFKPAMPRSVVGTACMYFKRFYLNNSVMEYHPRIIMLTCAFLACKVDEFNVSSPQFVGNLRESPLGQEKALEQILEYELLLIQQLNFHLIVHNPYRPFEGFLIDLKTRYPILENPEILRKTADDFLNRIALTDAYLLYTPSQIALTAILSSASRAGITMESYLSESLMLKENRTCLSQLLDIMKSMRNLVKKYEPPRSEEVAVLKQKLERCHSAELALNVITKKRKGYEDDDYVSKKSKHEEEEWTDDDLVESL

SEQ ID NO: 3295 - protein, 246 aa, Homo sapiens
MSIYKEPPPGMFVVPDTVDMTKIHALITGPFDTPYEGGFFLFVFRCPPDYPIHPPRVKLMTTGNNTVRFNPNFYRNGKVCLSILGTWTGPAWSPAQSISSVLISIQSLMTENPYHNEPGFEQERHPGDSKNYNECIRHETIRVAVCDMMEGKCPCPEPLRGVMEKSFLEYYDFYEVACKDRLHLQGQTMQDPFGEKRGHFDYQSLLMRLGLIRQKVLERLHNENAEMDSDSSSSGTETDLHGSLRV

SEQ ID NO: 3296 - protein, 582 aa, Homo sapiens
MMKLRHKNKKPGEGSKGHKKISWPYPQPAKQNGKKATSKVPSAPHFVHPNDHANREAELKKKWVEEMREKQQAAREQERQKRRTIESYCQDVLRRQEEFEHKEEVLQELNMFPQLDDEATRKAYYKEFRKVVEYSDVILEVLDARDPLGCRCFQMEEAVLRAQGNKKLVLVLNKIDLVPKEVVEKWLDYLRNELPTVAFKASTQHQVKNLNRCSVPVDQASESLLKSKACFGAENLMRVLGNYCRLGEVRTHIRVGVVGLPNVGKSSLINSLKRSRACSVGAVPGITKFMQEVYLDKFIRLLDAPGIVPGPNSEVGTILRNCVHVQKLADPVTPVETILQRCNLEEISNYYGVSGFQTTEHFLTAVAHRLGKKKKGGLYSQEQAAKAVLADWVSGKISFYIPPPATHTLPTHLSAEIVKEMTEVFDIEDTEQANEDTMECLATGESDELLGDTDPLEMEIKLLHSPMTKIADAIENKTTVYKIGDLTGYCTNPNRHQMGWAKRNVDHRPKSNSMVDVCSVDRRSVLQRIMETDPLQQGQALASALKNKKKMQKRADKIASKLSDSMMSALDLSGNADDGVGD

SEQ ID NO: 3297 - protein, 448 aa, Homo sapiens
MKGGTLGGIPGEPAVDHRDVDELLEFINSTEPKVPNSARAAKRARHKLKKKEKEKAQLAAEALKQANRVSGSREPRPARERLLEWPDRELDRVNSFLSSRLQEIKNTVKDSIRASFSVCELSMDSNGFSKEGAAEPEPQSLPPSNLSGSSEQQPDINLDLSPLTLGSPQNHTLQAPGEPAPPWAEMRGPHPPWTEVRGPPPGIVPENGLVRRLNTVPNLSRVIWVKTPKPGYPSSEEPSSKEVPSCKQELPEPVSSGGKPQKGKRQGSQAKKSEASPAPRPPASLEVPSAKGQVAGPKQPGRVLELPKVGSCAEAGEGSRGSRPGPGWAGSPKTEKEKGSSWRNWPGEAKARPQEQESVQPPGPARPQSLPQGKGRSRRSRNKQEKPASSLDDVFLPKDMDGVEMDETDREVEYFKRFCLDSAKQTRQKVAVNWTNFSLKKTTPSTAQ

SEQ ID NO: 3298 - protein, 493 aa, Homo sapiens
MLGKDYMLAIILVNCDDDLWGDHSLEVEAGLPPGWRKIHDAAGTYYWHVPSGSTQWQRPTWELGDAEDPGTGTEGIWGLRPPKGRSFSSLESSLDRSNSLSWYGGESYIQSMEPGAKCFAVRSLGWVEVPEEDLAPGKSSIAVNNCIQQLAQTRSRSQPPDGAWGEGQNMLMILKKDAMSLVNPLDHSLIHCQPLVHIRVWGVGSSKGRDSPISAPARDFAFVASDKDSCMLKCHVFRCDVPAKAIASALHGLCAQILSERVEVSGDASCCSPDPISPEDLPRQVELLDAVSQAAQKYEALYMGTLPVTKAMGMDVLNEAIGTLTARGDRNAWVPTMLSVSDSLMTAHPIQAEASTEEEPLWQCPVRLVTFIGVGRDPHTFGLIADLGRQSFQCAAFWCQPHAGGLSEAVQAACMVQYQKCLVASAARGKAWGAQARARLRLKRTSSMDSPGGPLPLPLLKGGVGGAGATPRKRGVFSFLDAFRLKPSLLHMP

SEQ ID NO: 3299 - protein, 491 aa, Homo sapiens
MLGKDYMLAIILVNCDDDLWGDHSLEVEAGLPPGWRKIHDAAGTYYWHVPSGSTQWQRPTWELGDAEDPGTGTEGIWGLRPPKGRSFSSLESSLDRSNSLSWYGGESYIQSMEPGAKCFAVRSLGWVEVPEEDLAPGKSSIAVNNCIQQLAQTRSRSQPPDGAWGEGQNMLMILKKDAMSLVNPLDHSLIHCQPLVHIRVWGVGSSKGRPISAPARDFAFVASDKDSCMLKCHVFRCDVPAKAIASALHGLCAQILSERVEVSGDASCCSPDPISPEDLPRQVELLDAVSQAAQKYEALYMGTLPVTKAMGMDVLNEAIGTLTARGDRNAWVPTMLSVSDSLMTAHPIQAEASTEEEPLWQCPVRLVTFIGVGRDPHTFGLIADLGRQSFQCAAFWCQPHAGGLSEAVQAACMVQYQKCLVASAARGKAWGAQARARLRLKRTSSMDSPGGPLPLPLLKGGVGGAGATPRKRGVFSFLDAFRLKPSLLHMP

SEQ ID NO: 3300 - protein, 486 aa, Homo sapiens
MLGKDYMLAIILVNCDDDLWGDHSLEVEAGLPPGWRKIHDAAGTYYWHVPSGSTQWQRPTWELGDAEDPGTGTEGIWGLRPPKGRSFSSLESSLDRSNSLSWYGGESYIQSMEPGAKCFAVRSLGWVEVPEEDLAPGKSSIAVNNCIQQLAQTRSRSQPPDGAWGEGQNMLMILKKDAMSLVNPLDHSLIHCQPLVHIRVWGVGSSKGRDRDFAFVASDKDSCMLKCHVFRCDVPAKAIASALHGLCAQILSERVEVSGDASCCSPDPISPEDLPRQVELLDAVSQAAQKYEALYMGTLPVTKAMGMDVLNEAIGTLTARGDRNAWVPTMLSVSDSLMTAHPIQAEASTEEEPLWQCPVRLVTFIGVGRDPHTFGLIADLGRQSFQCAAFWCQPHAGGLSEAVQAACMVQYQKCLVASAARGKAWGAQARARLRLKRTSSMDSPGGPLPLPLLKGGVGGAGATPRKRGVFSFLDAFRLKPSLLHMP

SEQ ID NO: 3301 - protein, 484 aa, Homo sapiens
MLGKDYMLAIILVNCDDDLWGDHSLEVEAGLPPGWRKIHDAAGTYYWHVPSGSTQWQRPTWELGDAEDPGTGTEGIWGLRPPKGRSFSSLESSLDRSNSLSWYGGESYIQSMEPGAKCFAVRSLGWVEVPEEDLAPGKSSIAVNNCIQQLAQTRSRSQPPDGAWGEGQNMLMILKKDAMSLVNPLDHSLIHCQPLVHIRVWGVGSSKGRDFAFVASDKDSCMLKCHVFRCDVPAKAIASALHGLCAQILSERVEVSGDASCCSPDPISPEDLPRQVELLDAVSQAAQKYEALYMGTLPVTKAMGMDVLNEAIGTLTARGDRNAWVPTMLSVSDSLMTAHPIQAEASTEEEPLWQCPVRLVTFIGVGRDPHTFGLIADLGRQSFQCAAFWCQPHAGGLSEAVQAACMVQYQKCLVASAARGKAWGAQARARLRLKRTSSMDSPGGPLPLPLLKGGVGGAGATPRKRGVFSFLDAFRLKPSLLHMP

SEQ ID NO: 3302 - protein, 214 aa, Homo sapiens
MLGKDYMLAIILVNCDDDLWGDHSLEVEAGLPPGWRKIHDAAGTYYWHVPSGSTQWQRPTWELGDAEDPGTGTEGIWGLRPPKGRSFSSLESSLDRSNSLSWYGGESYIQSMEPGAKCFAVRSLGWVEVPEEDLAPGKSSIAVNNCIQQLAQTRSRSQPPDGAWGEGQNMLMILKKDAMSLVNPLDHSLIHCQPLAVIPTDADPQYLNPWTQIL

SEQ ID NO: 3303 - protein, 245 aa, Homo sapiens
MLGKDYMLAIILVNCDDDLWGDHSLEVEAGLPPGWRKIHDAAGTYYWHVPSGSTQWQRPTWELGDAEDPGTGTEGIWGLRPPKGRSFSSLESSLDRSNSLSWYGGESYIQSMEPGAKCFAVRSLGWVEVPEEDLAPGKSSIAVNNCIQQLAQTRSRSQPPDGAWGEGQNMLMILKKDAMSLVNPLDHSLIHCQPLVHIRVWGVGSSKGRSSDVDPGLLPLPGPALVGEGGPSSAGTVWGESERLG

SEQ ID NO: 3304 - protein, 154 aa, Homo sapiens
MPSRQLEDPGAGTPSPVRLHALAGFQQRALCHALTFPSLQRLVYSMCSLCQEENEDMVPDALQQNPGAFRLAPALPARPHRGLSTFPGAEHCLRASPKTTLSGGFFVAVIERVEMPTSASQAKASAPERTPSPAPKRKKRQQRAAAGACTPPCT

SEQ ID NO: 3305 - protein, 154 aa, Homo sapiens; identical to SEQ ID NO: 3304

SEQ ID NO: 3306 - protein, 154 aa, Homo sapiens; identical to SEQ ID NO: 3304

SEQ ID NO: 3307 - protein, 194 aa, Homo sapiens
MTQNLGSEMASILRSPQALQLTLALIKPDAVAHPLILEAVHQQILSNKFLIVRMRELLWRKEDCQRFYREHEGRFFYQRLVEFMASGPIRAYILAHKDAIQLWRTLMGPTRVFRARHVAPDSIRGSFGLTDTRNTTHGSDSVVSASREIAAFFPDFSEQRWYEEEEPQLRCGPVCYSPEGGVHYVAGTGGLGPA

SEQ ID NO: 3308 - protein, 331 aa, Homo sapiens
MEPEFLYDLLQLPKGVEPPAEEELSKGGKKKYLPPTSRKDPKFEELQKVLMEWINATLLPEHIVVRSLEEDMFDGLILHHLFQRLAALKLEAEDIALTATSQKHKLTVVLEAVNRSLQLEEWQAKWSVESIFNKDLLSTLHLLVALAKRFQPDLSLPTNVQVEVITIESTKSGLKSEKLVEQLTEYSTDKDEPPKDVFDELFKLAPEKVNAVKEAIVNFVNQKLDRLGLSVQNLDTQFADGVILLLLIGQLEGFFLHLKEFYLTPNSPAEMLHNVTLALELLKDEGLLSCPVSPEDIVNKDAKSTLRVLYGLFCKHTQKAHRDRTPHGAPN

SEQ ID NO: 3309 - protein, 193 aa, Homo sapiens
MSDDDSRASTSSSSSSSSNQQTEKETNTPKKKESKVSMSKNSKLLSTSAKRIQKELADITLDPPPNCSAGPKGDNIYEWRSTILGPPGSVYEGGVFFLDITFTPEYPFKPPKVTFRTRIYHCNINSQGVICLDILKDNWSPALTISKVLLSICSLLTDCNPADPLVGSIATQYMTNRAEHDRMARQWTKRYAT

SEQ ID NO: 3310 - protein, 176 aa, Homo sapiens
MSDDDSRASTSSSSSSSSNQQTEKETNTPKKKESKVSMSKNSKLLSTSAKSAGPKGDNIYEWRSTILGPPGSVYEGGVFFLDITFTPEYPFKPPKVTFRTRIYHCNINSQGVICLDILKDNWSPALTISKVLLSICSLLTDCNPADPLVGSIATQYMTNRAEHDRMARQWTKRYAT

SEQ ID NO: 3311 - protein, 260 aa, Homo sapiens
MVWPALWELYRELGLFQGPALGLRNHLGRKLRRRKKKKAKRTTNWKIITDRPGFHDESAIYPVGYCSTRIYASMKCPDQKCLYTCQIKDGGVQPQFEIVPEDDPQNAIVSSSADACHAELLRTISTTMGKLMPNLLPAGADFFGFSHPAIHNLIQSCPGARKCINYQWVKFDVCKPGDGQLPEGLPENDAAMSFEAFQRQIFDEDQNDPLLPGSLDLPELQPAAFVSSYQPMYLTHEPLVDTHLQHLKSPSQGSPIQSSD

SEQ ID NO: 3312 - protein, 1709 aa, Homo sapiens
MDADSASSSESERNITIMASGNTGGEKDGLRNSTGLGSQNKFVVGSSSNNVGHGSSTGPWGFSHGAIISTCQVSVDAPESKSESSNNRMNAWGTVSSSSNGGLNPSTLNSASNHGAWPVLENNGLALKGPVGSGSSGINIQCSTIGQMPNNQSINSKVSGGSTHGTWGSLQETCESEVSGTQKVSFSGQPQNITTEMTGPNNTTNFMTSSLPNSGSVQNNELPSSNTGAWRVSTMNHPQMQAPSGMNGTSLSHLSNGESKSGGSYGTTWGAYGSNYSGDKCSGPNGQANGDTVNATLMQPGVNGPMGTNFQVNTNKGGGVWESGAANSQSTSWGSGNGANSGGSRRGWGTPAQNTGTNLPSVEWNKLPSNQHSNDSANGNGKTFTNGWKSTEEEDQGSATSQTNEQSSVWAKTGGTVESDGSTESTGRLEEKGTGESQSRDRRKIDQHTLLQSIVNRTDLDPRVLSNSGWGQTPIKQNTAWDTETSPRGERKTDNGTEAWGSSATQTFNSGACIDKTSPNGNDTSSVSGWGDPKPALRWGDSKGSNCQGGWEDDSAATGMVKSNQWGNCKEEKAAWNDSQKNKQGWGDGQKSSQGWSVSASDNWGETSRNNHWGEANKKSSSGGSDSDRSVSGWNELGKTSSFTWGNNINPNNSSGWDESSKPTPSQGWGDPPKSNQSLGWGDSSKPVSSPDWNKQQDIVGSWGIPPATGKPPGTGWLGGPIPAPAKEEEPTGWEEPSPESIRRKMEIDDGTSAWGDPSKYNYKNVNMWNKNVPNGNSRSDQQAQVHQLLTPASAISNKEASSGSGWGEPWGEPSTPATTVDNGTSAWGKPIDSGPSWGEPIAAASSTSTWGSSSVGPQALSKSGPKSMQDGWCGDDMPLPGNRPTGWEEEEDVEIGMWNSNSSQELNSSLNWPPYTKKMSSKGLSGKKRRRERGMMKGGNKQEEAWINPFVKQFSNISFSRDSPEENVQSNKMDLSGGMLQDKRMEIDKHSLNIGDYNRTVGKGPGSRPQISKESSMERNPYFDKDGIVADESQNMQFMSSQSMKLPPSNSALPNQALGSIAGLGMQNLNSVRQNGNPSMFGVGNTAAQPRGMQQPPAQPLSSSQPNLRAQVPPPLLSPQVPVSLLKYAPNNGGLNPLFGPQQVAMLNQLSQLNQLSQISQLQRLLAQQQRAQSQRSVPSGNRPQQDQQGRPLSVQQQMMQQSRQLDPNLLVKQQTPPSQQQPLHQPAMKSFLDNVMPHTTPELQKGPSPINAFSNFPIGLNSNLNVNMDMNSIKEPQSRLRKWTTVDSISVNTSLDQNSSKHGAISSGFRLEESPFVPYDFMNSSTSPASPPGSIGDGWPRAKSPNGSSSVNWPPEFRPGEPWKGYPNIDPETDPYVTPGSVINNLSINTVREVDHLRDRNSGSSSSLNTTLPSTSAWSSIRASNYNVPLSSTAQSTSARNSDSKLTWSPGSVTNTSLAHELWKVPLPPKNITAPSRPPPGLTGQKPPLSTWDNSPLRIGGGWGNSDARYTPGSSWGESSSGRITNWLVLKNLTPQIDGSTLRTLCMQHGPLITFHLNLPHGNALVRYSSKEEVVKAQKSLHMCVLGNTTILAEFASEEEISRFFAQSQSLTPSPGWQSLGSSQSRLGSLDCSHSFSSRTDLNHWNGAGLSGTNCGDLHGTSLWGTPHYSTSLWGPPSSSDPRGISSPSPINAFLSVDHLGGGGESM

SEQ ID NO: 3313 - protein, 1962 aa, Homo sapiens
MRELEAKATKDVERNLSRDLVQEEEQLMEETEKEKDDKKKKEAAQKKATEQKIKVPEQIKPSVSQPQPANSNNGTSTATSTNNNAKRATANNQQPQQQQQQQQPQQQQPQQQPQPQPQQQQPQQQPQALPRYPREVPPRFRHQEHKQLLKRGQHFPVIAANLGSAVKVLNSQSESSALTNQQPQNNGEVQNSKNQSDINHSTSGSHYENSQRGPVSSTSDSSTNCKNAVVSDLSEKEAWPSAPGSDPELASECMDADSASSSESERNITIMASGNTGGEKDGLRNSTGLGSQNKFVVGSSSNNVGHGSSTGPWGFSHGAIISTCQVSVDAPESKSESSNNRMNAWGTVSSSSNGGLNPSTLNSASNHGAWPVLENNGLALKGPVGSGSSGINIQCSTIGQMPNNQSINSKVSGGSTHGTWGSLQETCESEVSGTQKVSFSGQPQNITTEMTGPNNTTNFMTSSLPNSGSVQNNELPSSNTGAWRVSTMNHPQMQAPSGMNGTSLSHLSNGESKSGGSYGTTWGAYGSNYSGDKCSGPNGQANGDTVNATLMQPGVNGPMGTNFQVNTNKGGGVWESGAANSQSTSWGSGNGANSGGSRRGWGTPAQNTGTNLPSVEWNKLPSNQHSNDSANGNGKTFTNGWKSTEEEDQGSATSQTNEQSSVWAKTGGTVESDGSTESTGRLEEKGTGESQSRDRRKIDQHTLLQSIVNRTDLDPRVLSNSGWGQTPIKQNTAWDTETSPRGERKTDNGTEAWGSSATQTFNSGACIDKTSPNGNDTSSVSGWGDPKPALRWGDSKGSNCQGGWEDDSAATGMVKSNQWGNCKEEKAAWNDSQKNKQGWGDGQKSSQGWSVSASDNWGETSRNNHWGEANKKSSSGGSDSDRSVSGWNELGKTSSFTWGNNINPNNSSGWDESSKPTPSQGWGDPPKSNQSLGWGDSSKPVSSPDWNKQQDIVGSWGIPPATGKPPGTGWLGGPIPAPAKEEEPTGWEEPSPESIRRKMEIDDGTSAWGDPSKYNYKNVNMWNKNVPNGNSRSDQQAQVHQLLTPASAISNKEASSGSGWGEPWGEPSTPATTVDNGTSAWGKPIDSGPSWGEPIAAASSTSTWGSSSVGPQALSKSGPKSMQDGWCGDDMPLPGNRPTGWEEEEDVEIGMWNSNSSQELNSSLNWPPYTKKMSSKGLSGKKRRRERGMMKGGNKQEEAWINPFVKQFSNISFSRDSPEENVQSNKMDLSGGMLQDKRMEIDKHSLNIGDYNRTVGKGPGSRPQISKESSMERNPYFDKDGIVADESQNMQFMSSQSMKLPPSNSALPNQALGSIAGLGMQNLNSVRQNGNPSMFGVGNTAAQPRGMQQPPAQPLSSSQPNLRAQVPPPLLSPQVPVSLLKYAPNNGGLNPLFGPQQVAMLNQLSQLNQLSQISQLQRLLAQQQRAQSQRSVPSGNRPQQDQQGRPLSVQQQMMQQSRQLDPNLLVKQQTPPSQQQPLHQPAMKSFLDNVMPHTTPELQKGPSPINAFSNFPIGLNSNLNVNMDMNSIKEPQSRLRKWTTVDSISVNTSLDQNSSKHGAISSGFRLEESPFVPYDFMNSSTSPASPPGSIGDGWPRAKSPNGSSSVNWPPEFRPGEPWKGYPNIDPETDPYVTPGSVINNLSINTVREVDHLRDRNSGSSSSLNTTLPSTSAWSSIRASNYNVPLSSTAQSTSARNSDSKLTWSPGSVTNTSLAHELWKVPLPPKNITAPSRPPPGLTGQKPPLSTWDNSPLRIGGGWGNSDARYTPGSSWGESSSGRITNWLVLKNLTPQIDGSTLRTLCMQHGPLITFHLNLPHGNALVRYSSKEEVVKAQKSLHMCVLGNTTILAEFASEEEISRFFAQSQSLTPSPGWQSLGSSQSRLGSLDCSHSFSSRTDLNHWNGAGLSGTNCGDLHGTSLWGTPHYSTSLWGPPSSSDPRGISSPSPINAFLSVDHLGGGGESM

SEQ ID NO: 3314 - protein, 396 aa, Homo sapiens
MDPRGTKRGAEKTEVAEPRNKLPRPAPSLPTDPALYSGPFPFYRRPSELGCFSLDAQRQYHGDARALRYYSPPPTNGPGPNFDLRDGYPDRYQPRDEEVQERLDHLLCWLLEHRGRLEGGPGWLAEAIVTWRGHLTKLLTTPYERQEGWQLAASRFQGTLYLSEVETPNARAQRLARPPLLRELMYMGYKFEQYMCADKPGSSPDPSGEVNTNVAFCSVLRSRLGSHPLLFSGEVDCTDPQAPSTQPPTCYVELKTSKEMHSPGQWRSFYRHKLLKWWAQSFLPGVPNVVAGFRNPDGFVSSLKTFPTMKMFEYVRNDRDGWNPSVCMNFCAAFLSFAQSTVVQDDPRLVHLFSWEPGGPVTVSVHQDAPYAFLPIWYVEAMTQDLPSPPKTPSPK

SEQ ID NO: 3315 - protein, 2855 aa, Homo sapiens
MEEKQQIILANQDGGTVAGAAPTFFVILKQPGNGKTDQGILVTNQDACALASSVSSPVKSKGKICLPADCTVGGITVTLDNNSMWNEFYHRSTEMILTKQGRRMFPYCRYWITGLDSNLKYILVMDISPVDNHRYKWNGRWWEPSGKAEPHVLGRVFIHPESPSTGHYWMHQPVSFYKLKLTNNTLDQEGHIILHSMHRYLPRLHLVPAEKAVEVIQLNGPGVHTFTFPQTEFFAVTAYQNIQITQLKIDYNPFAKGFRDDGLNNKPQRDGKQKNSSDQEGNNISSSSGHRVRLTEGQGSEIQPGDLDPLSRGHETSGKGLEKTSLNIKRDFLGFMDTDSALSEVPQLKQEISECLIASSFEDDSRVASPLDQNGSFNVVIKEEPLDDYDYELGECPEGVTVKQEETDEETDVYSNSDDDPILEKQLKRHNKVDNPEADHLSSKWLPSSPSGVAKAKMFKLDTGKMPVVYLEPCAVTRSTVKISELPDNMLSTSRKDKSSMLAELEYLPTYIENSNETAFCLGKESENGLRKHSPDLRVVQKYPLLKEPQWKYPDISDSISTERILDDSKDSVGDSLSGKEDLGRKRTTMLKIATAAKVVNANQNASPNVPGKRGRPRKLKLCKAGRPPKNTGKSLISTKNTPVSPGSTFPDVKPDLEDVDGVLFVSFESKEALDIHAVDGTTEESSSLQASTTNDSGYRARISQLEKELIEDLKTLRHKQVIHPGLQEVGLKLNSVDPTMSIDLKYLGVQLPLAPATSFPFWNLTGTNPASPDAGFPFVSRTGKTNDFTKIKGWRGKFHSASASRNEGGNSESSLKNRSAFCSDKLDEYLENEGKLMETSMGFSSNAPTSPVVYQLPTKSTSYVRTLDSVLKKQSTISPSTSYSLKPHSVPPVSRKAKSQNRQATFSGRTKSSYKSILPYPVSPKQKYSHVILGDKVTKNSSGIISENQANNFVVPTLDENIFPKQISLRQAQQQQQQQQGSRPPGLSKSQVKLMDLEDCALWEGKPRTYITEERADVSLTTLLTAQASLKTKPIHTIIRKRAPPCNNDFCRLGCVCSSLALEKRQPAHCRRPDCMFGCTCLKRKVVLVKGGSKTKHFQRKAAHRDPVFYDTLGEEAREEEEGIREEEEQLKEKKKRKKLEYTICETEPEQPVRHYPLWVKVEGEVDPEPVYIPTPSVIEPMKPLLLPQPEVLSPTVKGKLLTGIKSPRSYTPKPNPIREEDKDPVYLYFESMMTCARVRVYERKKEDQRQPSSSSSPSPSFQQQTSCHSSPENHNNAKEPDSEQQPLKQLTCDLEDDSDKLQEKSWKSSCNEGESSSTSYMHQRSPGGPTKLIEIISDCNWEEDRNKILSILSQHINSNMPQSLKVGSFIIELASQRKSRGEKNPPVYSSRVKISMPSCQDQDDMAEKSGSETPDGPLSPGKMEDISPVQTDALDSVRERLHGGKGLPFYAGLSPAGKLVAYKRKPSSSTSGLIQVASNAKVAASRKPRTLLPSTSNSKMASSSGTATNRPGKNLKAFVPAKRPIENAAQIPVATPQVSPNTVKRAGPRLLLIPVQQGSPTLRPVSNTQLQGHRMVLQPVRSPSGMNLFRHPNGQIVQLLPLHQLRGSNTQPNLQPVMFRNPGSVMGIRLPAPSKPSETPPSSTSSSAFSVMNPVIQAVGSSSAVNVITQAPSLLSSGASFVSQAGTLTLRISPPEPQSFASKTGSETKITYSSGGQPVGTASLIPLQSGSFALLQLPGQKPVPSSILQHVASLQMKRESQNPDQKDETNSIKREQETKKVLQSEGEAVDPEANVIKQNSGAATSEETLNDSLEDRGDHLDEECLPEEGCATVKPSEHSCITGSHTDQDYKDVNEEYGARNRKSSKEKVAVLEVRTISEKASNKTVQNLSKVQHQKLGDVKVEQQKGFDNPEENSSEFPVTFKEESKFELSGSKVMEQQSNLQPEAKEKECGDSLEKDRERWRKHLKGPLTRKCVGASQECKKEADEQLIKETKTCQENSDVFQQEQGISDLLGKSGITEDARVLKTECDSWSRISNPSAFSIVPRRAAKSSRGNGHFQGHLLLPGEQIQPKQEKKGGRSSADFTVLDLEEDDEDDNEKTDDSIDEIVDVVSDYQSEEVDDVEKNNCVEYIEDDEEHVDIETVEELSEEINVAHLKTTAAHTQSFKQPSCTHISADEKAAERSRKAPPIPLKLKPDYWSDKLQKEAEAFAYYRRTHTANERRRRGEMRDLFEKLKITLGLLHSSKVSKSLILTRAFSEIQGLTDQADKLIGQKNLLTRKRNILIRKVSSLSGKTEEVVLKKLEYIYAKQQALEAQKRKKKMGSDEFDISPRISKQQEGSSASSVDLGQMFINNRRGKPLILSRKKDQATENTSPLNTPHTSANLVMTPQGQLLTLKGPLFSGPVVAVSPDLLESDLKPQVAGSAVALPENDDLFMMPRIVNVTSLATEGGLVDMGGSKYPHEVPDSKPSDHLKDTVRNEDNSLEDKGRISSRGNRDGRVTLGPTQVFLANKDSGYPQIVDVSNMQKAQEFLPKKISGDMRGIQYKWKESESRGERVKSKDSSFHKLKMKDLKDSSIEMELRKVTSAIEEAALDSSELLTNMEDEDDTDETLTSLLNEIAFLNQQLNDDSVGLAELPSSMDTEFPGDARRAFISKVPPGSRATFQVEHLGTGLKELPDVQGESDSISPLLLHLEDDDFSENEKQLAEPASEPDVLKIVIDSEIKDSLLSNKKAIDGGKNTSGLPAEPESVSSPPTLHMKTGLENSNSTDTLWRPMPKLAPLGLKVANPSSDADGQSLKVMPCLAPIAAKVGSVGHKMNLTGNDQEGRESKVMPTLAPVVAKLGNSGASPSSAGK

SEQ ID NO: 3316 - protein, 2855 aa, Homo sapiens; identical to SEQ ID NO: 3315

SEQ ID NO: 3317 - protein, 627 aa, Homo sapiens
MRDLFEKLKITLGLLHSSKVSKSLILTRAFSEIQGLTDQADKLIGQKNLLTRKRNILIRKVSSLSGKTEEVVLKKLEYIYAKQQALEAQKRKKKMGSDEFDISPRISKQQEGSSASSVDLGQMFINNRRGKPLILSRKKDQATENTSPLNTPHTSANLVMTPQGQLLTLKGPLFSGPVVAVSPDLLESDLKPQVAGSAVALPENDDLFMMPRIVNVTSLATEGGLVDMGGSKYPHEVPDSKPSDHLKDTVRNEDNSLEDKGRISSRGNRDGRVTLGPTQVFLANKDSGYPQIVDVSNMQKAQEFLPKKISGDMRGIQYKWKESESRGERVKSKDSSFHKLKMKDLKDSSIEMELRKVTSAIEEAALDSSELLTNMEDEDDTDETLTSLLNEIAFLNQQLNDDSVGLAELPSSMDTEFPGDARRAFISKVPPGSRATFQVEHLGTGLKELPDVQGESDSISPLLLHLEDDDFSENEKQLAEPASEPDVLKIVIDSEIKDSLLSNKKAIDGGKNTSGLPAEPESVSSPPTLHMKTGLENSNSTDTLWRPMPKLAPLGLKVANPSSDADGQSLKVMPCLAPIAAKVGSVGHKMNLTGNDQEGRESKVMPTLAPVVAKLGNSGASPSSAGK

SEQ ID NO: 3318 - protein, 1563 aa, Homo sapiens
MASSSGTATNRPGKNLKAFVPAKRPIAARPSPGGVFTQFVMSKVGALQQKIPGVSTPQTLAGTQKFSIRPSPVMVVTPVVSSEPVQVCSPVTAAVTTTTPQVFLENTTAVTPMTAISDVETKETTYSSGATTTGVVEVSETNTSTSVTSTQSTATVNLTKTTGITTPVASVAFPKSLVASPSTITLPVASTASTSLVVVTAAASSSMVTTPTSSLGSVPIILSGINGSPPVSQRPENAAQIPVATPQVSPNTVKRAGPRLLLIPVQQGSPTLRPVSNTQLQGHRMVLQPVRSPSGMNLFRHPNGQIVQLLPLHQLRGSNTQPNLQPVMFRNPGSVMGIRLPAPSKPSETPPSSTSSSAFSVMNPVIQAVGSSSAVNVITQAPSLLSSGASFVSQAGTLTLRISPPEPQSFASKTGSETKITYSSGGQPVGTASLIPLQSGSFALLQLPGQKPVPSSILQHVASLQMKRESQNPDQKDETNSIKREQETKKVLQSEGEAVDPEANVIKQNSGAATSEETLNDSLEDRGDHLDEECLPEEGCATVKPSEHSCITGSHTDQDYKDVNEEYGARNRKSSKEKVAVLEVRTISEKASNKTVQNLSKVQHQKLGDVKVEQQKGFDNPEENSSEFPVTFKEESKFELSGSKVMEQQSNLQPEAKEKECGDSLEKDRERWRKHLKGPLTRKCVGASQECKKEADEQLIKETKTCQENSDVFQQEQGISDLLGKSGITEDARVLKTECDSWSRISNPSAFSIVPRRAAKSSRGNGHFQGHLLLPGEQIQPKQEKKGGRSSADFTVLDLEEDDEDDNEKTDDSIDEIVDVVSDYQSEEVDDVEKNNCVEYIEDDEEHVDIETVEELSEEINVAHLKTTAAHTQSFKQPSCTHISADEKAAERSRKAPPIPLKLKPDYWSDKLQKEAEAFAYYRRTHTANERRRRGEMRDLFEKLKITLGLLHSSKVSKSLILTRAFSEIQGLTDQADKLIGQKNLLTRKRNILIRKVSSLSGKTEEVVLKKLEYIYAKQQALEAQKRKKKMGSDEFDISPRISKQQEGSSASSVDLGQMFINNRRGKPLILSRKKDQATENTSPLNTPHTSANLVMTPQGQLLTLKGPLFSGPVVAVSPDLLESDLKPQVAGSAVALPENDDLFMMPRIVNVTSLATEGGLVDMGGSKYPHEVPDSKPSDHLKDTVRNEDNSLEDKGRISSRGNRDGRVTLGPTQVFLANKDSGYPQIVDVSNMQKAQEFLPKKISGDMRGIQYKWKESESRGERVKSKDSSFHKLKMKDLKDSSIEMELRKVTSAIEEAALDSSELLTNMEDEDDTDETLTSLLNEIAFLNQQLNDDSVGLAELPSSMDTEFPGDARRAFISKVPPGSRATFQVEHLGTGLKELPDVQGESDSISPLLLHLEDDDFSENEKQLAEPASEPDVLKIVIDSEIKDSLLSNKKAIDGGKNTSGLPAEPESVSSPPTLHMKTGLENSNSTDTLWRPMPKLAPLGLKVANPSSDADGQSLKVMPCLAPIAAKVGSVGHKMNLTGNDQEGRESKVMPTLAPVVAKLGNSGASPSSAGK

SEQ ID NO: 3319 - protein, 2855 aa, Homo sapiens
MEEKQQIILANQDGGTVAGAAPTFFVILKQPGNGKTDQGILVTNQDACALASSVSSPVKSKGKICLPADCTVGGITVTLDNNSMWNEFYHRSTEMILTKQGRRMFPYCRYWITGLDSNLKYILVMDISPVDNHRYKWNGRWWEPSGKAEPHVLGRVFIHPESPSTGHYWMHQPVSFYKLKLTNNTLDQEGHIILHSMHRYLPRLHLVPAEKAVEVIQLNGPGVHTFTFPQTEFFAVTAYQNIQITQLKIDYNPFAKGFRDDGLNNKPQRDGKQKNSSDQEGNNISSSSGHRVRLTEGQGSEIQPGDLDPLSRGHETSGKGLEKTSLNIKRDFLGFMDTDSALSEVPQLKQEISECLIASSFEDDSRVASPLDQNGSFNVVIKEEPLDDYDYELGECPEGVTVKQEETDEETDVYSNSDDDPILEKQLKRHNKVDNPEADHLSSKWLPSSPSGVAKAKMFKLDTGKMPVVYLEPCAVTRSTVKISELPDNMLSTSRKDKSSMLAELEYLPTYIENSNETAFCLGKESENGLRKHSPDLRVVQKYPLLKEPQWKYPDISDSISTERILDDSKDSVGDSLSGKEDLGRKRTTMLKIATAAKVVNANQNASPNVPGKRGRPRKLKLCKAGRPPKNTGKSLISTKNTPVSPGSTFPDVKPDLEDVDGVLFVSFESKEALDIHAVDGTTEESSSLQASTTNDSGYRARISQLEKELIEDLKSLRHKQVIHPGLQEVGLKLNSVDPTMSIDLKYLGVQLPLAPATSFPFWNLTGTNPASPDAGFPFVSRTGKTNDFTKIKGWRGKFHSASASRNEGGNSESSLKNRSAFCSDKLDEYLENEGKLMETSMGFSSNAPTSPVVYQLPTKSTSYVRTLDSVLKKQSTISPSTSYSLKPHSVPPVSRKAKSQNRQATFSGRTKSSYKSILPYPVSPKQKYSHVILGDKVTKNSSGIISENQANNFVVPTLDENIFPKQISLRQAQQQQQQQQGSRPPGLSKSQVKLMDLEDCALWEGKPRTYITEERADVSLTTLLTAQASLKTKPIHTIIRKRAPPCNNDFCRLGCVCSSLALEKRQPAHCRRPDCMFGCTCLKRKVVLVKGGSKTKHFQRKAAHRDPVFYDTLGEEAREEEEGIREEEEQLKEKKKRKKLEYTICETEPEQPVRHYPLWVKVEGEVDPEPVYIPTPSVIEPMKPLLLPQPEVLSPTVKGKLLTGIKSPRSYTPKPNPIREEDKDPVYLYFESMMTCARVRVYERKKEDQRQPSSSSSPSPSFQQQTSCHSSPENHNNAKEPDSEQQPLKQLTCDLEDDSDKLQEKSWKSSCNEGESSSTSYMHQRSPGGPTKLIEIISDCNWEEDRNKILSILSQHINSNMPQSLKVGSFIIELASQRKSRGEKNPPVYSSRVKISMPSCQDQDDMAEKSGSETPDGPLSPGKMEDISPVQTDALDSVRERLHGGKGLPFYAGLSPAGKLVAYKRKPSSSTSGLIQVASNAKVAASRKPRTLLPSTSNSKMASSSGTATNRPGKNLKAFVPAKRPIENAAQIPVATPQVSPNTVKRAGPRLLLIPVQQGSPTLRPVSNTQLQGHRMVLQPVRSPSGMNLFRHPNGQIVQLLPLHQLRGSNTQPNLQPVMFRNPGSVMGIRLPAPSKPSETPPSSTSSSAFSVMNPVIQAVGSSSAVNVITQAPSLLSSGASFVSQAGTLTLRISPPEPQSFASKTGSETKITYSSGGQPVGTASLIPLQSGSFALLQLPGQKPVPSSILQHVASLQMKRESQNPDQKDETNSIKREQETKKVLQSEGEAVDPEANVIKQNSGAATSEETLNDSLEDRGDHLDEECLPEEGCATVKPSEHSCITGSHTDQDYKDVNEEYGARNRKSSKEKVAVLEVRTISEKASNKTVQNLSKVQHQKLGDVKVEQQKGFDNPEENSSEFPVTFKEESKFELSGSKVMEQQSNLQPEAKEKECGDSLEKDRERWRKHLKGPLTRKCVGASQECKKEADEQLIKETKTCQENSDVFQQEQGISDLLGKSGITEDARVLKTECDSWSRISNPSAFSIVPRRAAKSSRGNGHFQGHLLLPGEQIQPKQEKKGGRSSADFTVLDLEEDDEDDNEKTDDSIDEIVDVVSDYQSEEVDDVEKNNCVEYIEDDEEHVDIETVEELSEEINVAHLKTTAAHTQSFKQPSCTHISADEKAAERSRKAPPIPLKLKPDYWSDKLQKEAEAFAYYRRTHTANERRRRGEMRDLFEKLKITLGLLHSSKVSKSLILTRAFSEIQGLTDQADKLIGQKNLLTRKRNILIRKVSSLSGKTEEVVLKKLEYIYAKQQALEAQKRKKKMGSDEFDISPRISKQQEGSSASSVDLGQMFINNRRGKPLILSRKKDQATENTSPLNTPHTSANLVMTPQGQLLTLKGPLFSGPVVAVSPDLLESDLKPQVAGSAVALPENDDLFMMPRIVNVTSLATEGGLVDMGGSKYPHEVPDSKPSDHLKDTVRNEDNSLEDKGRISSRGNRDGRVTLGPTQVFLANKDSGYPQIVDVSNMQKAQEFLPKKISGDMRGIQYKWKESESRGERVKSKDSSFHKLKMKDLKDSSIEMELRKVTSAIEEAALDSSELLTNMEDEDDTDETLTSLLNEIAFLNQQLNDDSVGLAELPSSMDTEFPGDARRAFISKVPPGSRATFQVEHLGTGLKELPDVQGESDSISPLLLHLEDDDFSENEKQLAEPASEPDVLKIVIDSEIKDSLLSNKKAIDGGKNTSGLPAEPESVSSPPTLHMKTGLENSNSTDTLWRPMPKLAPLGLKVANPSSDADGQSLKVMPCLAPIAAKVGSVGHKMNLTGNDQEGRESKVMPTLAPVVAKLGNSGASPSSAGK

SEQ ID NO: 3320 - protein, 2855 aa, Homo sapiens; identical to SEQ ID NO: 3319

SEQ ID NO: 3321 - protein, 627 aa, Homo sapiens; identical to SEQ ID NO: 3317

SEQ ID NO: 3322 - protein, 1563 aa, Homo sapiens; identical to SEQ ID NO: 3318

SEQ ID NO: 3323 - protein, 711 aa, Homo sapiens
MMADAKYVLCRWEKRLWPAKVLARTATSTKNKRRKEYFLAVQILSLEEKIKVKSTEVEILEKSQIEAIASSLASQNEVPAAPLEELAYRRSLRVALDVLSEGSIWSQESSAGTGRADRSLRGKPMEHVSSPCDSNSSSLPRGDVLGSSRPHRRRPCVQQSLSSSFTCEKDPECKVDHKKGLRKSENPRGPLVLPAGGGAQDESGSRIHHKNWTLASKRGGNSAQKASLCLNGSSLSEDDTERDMGSKGGSWAAPSLPSGVREDDPCANAEGHDPGLPLGSLTAPPAPEPSACSEPGECPAKKRPRLDGSQRPPAVQLEPMAAGAAPSPGPGPGPRESVTPRSTARLGPPPSHASADATRCLPCPDSQKLEKECQSSEESMGSNSMRSILEEDEEDEEPPRVLLYHEPRSFEVGMLVWHKHKKYPFWPAVVKSVRQRDKKASVLYIEGHMNPKMKGFTVSLKSLKHFDCKEKQTLLNQAREDFNQDIGWCVSLITDYRVRLGCGSFAGSFLEYYAADISYPVRKSIQQDVLGTKLPQLSKGSPEEPVVGCPLGQRQPCRKMLPDRSRAARDRANQKLVEYIVKAKGAESHLRAILKSRKPSRWLQTFLSSSQYVTCVETYLEDEGQLDLVVKYLQGVYQEVGAKVLQRTNGDRIRFILDVLLPEAIICAISAVDEVDYKTAEEKYIKGPSLSYREKEIFDNQLLEERNRRRR

SEQ ID NO: 3324 - protein, 1086 aa, Homo sapiens
MEKWEELNSHQPGEEYDPSKATFVKVVPTPNNGSTELVALHRNEGEDGLEVLSFEFQKIKYSYDALEKKQFLPVAFPVGNAFSYYQSNRGFQEDSEIRAAEKKFGSNKAEMVVPDFSELFKERATAPFFVFQVFCVGLWCLDEYWYYSVFTLSMLVAFEASLVQQQMRNMSEIRKMGNKPHMIQVYRSRKWRPIASDEIVPGDIVSIGRSPQENLVPCDVLLLRGRCIVDEAMLTGESVPQMKEPIEDLSPDRVLDLQADSRLHVIFGGTKVVQHIPPQKATTGLKPVDSGCVAYVLRTGFNTSQGKLLRTILFGVKRVTANNLETFIFILFLLVFAIAAAAYVWIEGTKDPSRNRYKLFLECTLILTSVVPPELPIELSLAVNTSLIALAKLYMYCTEPFRIPFAGKVEVCCFDKTGTLTSDSLVVRGVAGLRDGKEVTPVSSIPVETHRALASCHSLMQLDDGTLVGDPLEKAMLTAVDWTLTKDEKVFPRSIKTQGLKIHQRFHFASALKRMSVLASYEKLGSTDLCYIAAVKGAPETLHSMFSQCPPDYHHIHTEISREGARVLALGYKELGHLTHQQAREVKREALECSLKFVGFIVVSCPLKADSKAVIREIQNASHRVVMITGDNPLTACHVAQELHFIEKAHTLILQPPSEKGRQCEWRSIDGSIVLPLARGSPKALALEYALCLTGDGLAHLQATDPQQLLRLIPHVQVFARVAPKQKEFVITSLKELGYVTLMCGDGTNDVGALKHADVGVALLANAPERVVERRRRPRDSPTLSNSGIRATSRTAKQRSGLPPSEEQPTSQRDRLSQVLRDLEDESTPIVKLGDASIAAPFTSKLSSIQCICHVIKQGRCTLVTTLQMFKILALNALILAYSQSVLYLEGVKFSDFQATLQGLLLAGCFLFISRSKPLKTLSRERPLPNIFNLYTILTVMLQFFVHFLSLVYLYREAQARSPEKQEQFVDLYKEFEPSLVNSTVYIMAMAMQMATFAINYKGPPFMESLPENKPLVWSLAVSLLAIIGLLLGSSPDFNSQFGLVDIPVEFKLVIAQVLLLDFCLALLADRVLQFFLGTPKLKVPS

SEQ ID NO: 3325 - protein, 743 aa, Homo sapiens
MAQASRSGSLPPLVIVPPLRAQPGGTGEEQWERSRTGGLRWEVHCWPSGTSGGTPWWPTPADVSEDYEADAAAWRRGPAGGGPIPPALQRLRAVLLRLHREREQLLQARDCAYHLQSAVRLMKTLSPGSPSGGPSPLPQWYRDLQLHPSQGAVLRIGPGETLEPLLLARPIGLAAQCLEAVIEMQLRALGREPASPGLSSQLAELLFALPAYHTLQRKALSHVPGAARPFPTSRVLRLLTGERGCQVASRLDEALQGSALRDQLRRRCQEEGDLLPGLLGLVGGVAGSASCGLGLGGAGALWCQYWTLLWAACAQSLDLNLGPWRDPRATAQQLSQALGQASLPQECEKELASLCHRLLHQSLIWSWDQGFCQALGSALGGQSSLPTSSGTAELLQQLFPPLLDALREPRLRRIFCQPAGLCTLQTTLLWFLGRAQQYLAAWDPASFLLLIQKDLPPLLHEAEALYSLASEESLALEVEQQLGLEIQKLTAQIQLLPEESLSVFSQECHKQAMQGFKLYMPRGRYWRLRLCPEPPSAPSEYAGLVVRTVLEPVLQGLQGLPPQAQAPALGQALTAIVGAWLDHILTHGIRFSLQGALQLKQDFGVVRELLEEEQWSLSPDLRQTLLMLSIFQQLDGALLCLLQQPLPKSQVHRRPPCCCACQEVQTTKLPSSCLNSLESLEPPLQPGTSPAQTGQLQSTLGGRGPSPEGYLVGNQQAWLALRQHQRPRWHLPFFSCLGTSPES

SEQ ID NO: 3326 - protein, 440 aa, Homo sapiens
MGPPGSPWQWVTLLLGLLLPPAAPFWLLNVLFPPHTTPKAELSNHTRPVILVPGCLGNQLEAKLDKPDVVNWMCYRKTEDFFTIWLDLNMFLPLGVDCWIDNTRVVYNRSSGLVSNAPGVQIRVPGFGKTYSVEYLDSSKLAGYLHTLVQNLVNNGYVRDETVRAAPYDWRLEPGQQEEYYRKLAGLVEEMHAAYGKPVFLIGHSLGCLHLLYFLLRQPQAWKDRFIDGFISLGAPWGGSIKPMLVLASGDNQGIPIMSSIKLKEEQRITTTSPWMFPSRMAWPEDHVFISTPSFNYTGRDFQRFFADLHFEEGWYMWLQSRDLLAGLPAPGVEVYCLYGVGLPTPRTYIYDHGFPYTDPVGVLYEDGDDTVATRSTELCGLWQGRQPQPVHLLPLHGIQHLNMVFSNLTLEHINAILLGAYRQGPPASPTASPEPPPPE

SEQ ID NO: 3327 - protein, 419 aa, Homo sapiens
MPLSDFILALKDNPYFGAGFGLVGVGTALALARKGVQLGLVAFRRHYMITLEVPARDRSYAWLLSWLTRHSTRTQHLSVETSYLQHESGRISTKFEFVPSPGNHFIWYRGKWIRVERSREMQMIDLQTGTPWESVTFTALGTDRKVFFNILEEARELALQQEEGKTVMYTAVGSEWRPFGYPRRRRPLNSVVLQQGLADRIVRDVQEFIDNPKWYTDRGIPYRRGYLLYGPPGCGKSSFITALAGELEHSICLLSLTDSSLSDDRLNHLLSVAPQQSLVLLEDVDAAFLSRDLAVENPVKYQGLGRLTFSGLLNALDGVASTEARIVFMTTNHVDRLDPALIRPGRVDLKEYVGYCSHWQLTQMFQRFYPGQAPSLAENFAEHVLRATNQISPAQVQGYFMLYKNDPVGAIHNAESLRR

SEQ ID NO: 3328 - protein, 209 aa, Homo sapiens
MELNSLLILLEAAEYLERRDREAEHGYASVLPFDGDFAREKTKAAGLVRKAPNNRSSHNELEKHRRAKLRLYLEQLKQLVPLGPDSTRHTTLSLLKRAKVHIKKLEEQDRRALSIKEQLQQEHRFLKRRLEQLSVQSVERVRTDSTGSAVSTDDSEQEVDIEGMEFGPGELDSVGSSSDADDHYSLQSGTGGDSGFGPHCRRLGRPALS

SEQ ID NO: 3329 - protein, 344 aa, Homo sapiens
MEAVKAEAWEGAAVAQDLLALGYGGVPGAASRGASCPDFRGLCVRLAAELATLGALEQQREAGAEVLSAGDGPGAEEDFLRQLGSLLRELHCPDRALCGGDGAAALREPGAGLRLLRFLCSELQATRLLCLRSLLDPSPRPPLGEGVVEGAGMVQELDLTLQALGLPRPAPGTPASQLLQELHAKISELQPSLPPGSLQPLLSCSLDAPRWEALESLSQSLRDQYRCRRCLLLKRLDLTTSAFHWSDRAEAQGEAMRAVLIPIREVLTPESDISIAHVLAARADLSCLWATFQTGGAAQMSWSLPCPPGGAEERMEAPSVGVARRRRRSKGGLVVGGGGSSMRC

SEQ ID NO: 3330 - protein, 524 aa, Homo sapiens
MSQGSPGDWAPLDPTPGPPASPNPFVHELHLSRLQRVKFCLLGALLAPIRVLLAFIVLFLLWPFAWLQVAGLSEEQLQEPITGWRKTVCHNGVLGLSRLLFFLLGFLRIRVRGQRASRLQAPVLVAAPHSTFFDPIVLLPCDLPKVVSRAENLSVPVIGALLRFNQAILVSRHDPASRRRVVEEVRRRATSGGKWPQVLFFPEGTCSNKKALLKFKPGAFIAGVPVQPVLIRYPNSLDTTSWAWRGPGVLKVLWLTASQPCSIVDVEFLPVYHPSPEESRDPTLYANNVQRVMAQALGIPATECEFVGSLPVIVVGRLKVALEPQLWELGKVLRKAGLSAGYVDAGAEPGRSRMISQEEFARQLQLSDPQTVAGAFGYFQQDTKGLVDFRDVALALAALDGGRSLEELTRLAFELFAEEQAEGPNRLLYKDGFSTILHLLLGSPHPAATALHAELCQAGSSQGLSLCQFQNFSLHDPLYGKLFSTYLRPPHTSRGTSQTPNASSPGNPTALANGTVQAPKQKGD

SEQ ID NO: 3331 - protein, 672 aa, Homo sapiens
MPGMVLFGRRWAIASDDLVFPGFFELVVRVLWWIGILTLYLMHRGKLDCAGGALLSSYLIVLMILLAVVICTVSAIMCVSMRGTICNPGPRKSMSKLLYIRLALFFPEMVWASLGAAWVADGVQCDRTVVNGIIATVVVSWIIIAATVVSIIIVFDPLGGKMAPYSSAGPSHLDSHDSSQLLNGLKTAATSVWETRIKLLCCCIGKDDHTRVAFSSTAELFSTYFSDTDLVPSDIAAGLALLHQQQDNIRNNQEPAQVVCHAPGSSQEADLDAELENCHHYMQFAAAAYGWPLYIYRNPLTGLCRIGGDCCRSRTTDYDLVGGDQLNCHFGSILHTTGLQYRDFIHVSFHDKVYELPFLVALDHRKESVVVAVRGTMSLQDVLTDLSAESEVLDVECEVQDRLAHKGISQAARYVYQRLINDGILSQAFSIAPEYRLVIVGHSLGGGAAALLATMLRAAYPQVRCYAFSPPRGLWSKALQEYSQSFIVSLVLGKDVIPRLSVTNLEDLKRRILRVVAHCNKPKYKILLHGLWYELFGGNPNNLPTELDGGDQEVLTQPLLGEQSLLTRWSPAYSFSSDSPLDSSPKYPPLYPPGRIIHLQEEGASGRFGCCSAAHYSAKWSHEAEFSKILIGPKMLTDHMPDILMRALDSVVSDRAACVSCPAQGVSSVDVA

SEQ ID NO: 3332 - protein, 2386 aa, Homo sapiens
MVVYGGNVHTHYQEEKCYEDGIFFYHLGCHQWVSGAELAPPGTPEGRAAPPSGRYSHVAAVLGGSVLLVAGGYSGRPRGDLMAYKVPPFVFQAPAPDYHLDYCSMYTDHSVCSRDPECSWCQGACQAAPPPGTPLGACPAASCLGLGRLLGDCQACLAFSSPTAPPRGPGTLGWCVHNESCLPRPEQARCRGEQISGTVGWWGPAPVFVTSLEACVTQSFLPGLHLLTFQQPPNTSQPDKVSIVRSTTITLTPSAETDVSLVYRGFIYPMLPGGPGGPGAEDVAVWTRAQRLHVLARMARGPDTENMEEVGRWVAHQEKETRRLQRPGSARLFPLPGRDHKYAVEIQGQLNGSAGPGHSELTLLWDRTGVPGGSEISFFFLEPYRSSSCTSYSSCLGCLADQGCGWCLTSATCHLRQGGAHCGDDGAGGSLLVLVPTLCPLCEEHRDCHACTQDPFCEWHQSTSRKGDAACSRRGRGRGALKSPEECPPLCSQRLTCEDCLANSSQCAWCQSTHTCFLFAAYLARYPHGGCRGWDDSVHSEPRCRSCDGFLTCHECLQSHECGWCGNEDNPTLGRCLQGDFSGPLGGGNCSLWVGEGLGLPVALPARWAYARCPDVDECRLGLARCHPRATCLNTPLSYECHCQRGYQGDGISHCNRTCLEDCGHGVCSGPPDFTCVCDLGWTSDLPPPTPAPGPPAPRCSRDCGCSFHSHCRKRGPGFCDECQDWTWGEHCERCRPGSFGNATGSRGCRPCQCNGHGDPRRGHCDNLSGLCFCQDHTEGAHCQLCSPGYYGDPRAGGSCFRECGGRALLTNVSSVALGSRRVGGLLPPGGGAARAGPGLSYCVWVVSATEELQPCAPGTLCPPLTLTFSPDSSTPCTLSYVLAFDGFPRFLDTGVVQSDRSLIAAFCGQRRDRPLTVQALSGLLVLHWEANGSSSWGFNASVGSARCGSGGPGSCPVPQECVPQDGAAGAGLCRCPQGWAGPHCRMALCPENCNAHTGAGTCNQSLGVCICAEGFGGPDCATKLDGGQLVWETLMDSRLSADTASRFLHRLGHTMVDGPDATLWMFGGLGLPQGLLGNLYRYSVSERRWTQMLAGAEDGGPGPSPRSFHAAAYVPAGRGAMYLLGGLTAGGVTRDFWVLNLTTLQWRQEKAPQTVELPAVAGHTLTARRGLSLLLVGGYSPENGFNQQLLEYQLATGTWVSGAQSGTPPTGLYGHSAVYHEATDSLYVFGGFRFHVELAAPSPELYSLHCPDRTWSLLAPSQGAKRDRMRNVRGSSRGLGQVPGEQPGSWGFREVRKKMALWAALAGTGGFLEEISPHLKEPRPRLFHASALLGDTMVVLGGRSDPDEFSSDVLLYQVNCNAWLLPDLTRSASVGPPMEESVAHAVAAVGSRLYISGGFGGVALGRLLALTLPPDPCRLLSSPEACNQSGACTWCHGACLSGDQAHRLGCGGSPCSPMPRSPEECRRLRTCSECLARHPRTLQPGDGEASTPRCKWCTNCPEGACIGRNGSCTSENDCRINQREVFWAGNCSEAACGAADCEQCTREGKCMWTRQFKRTGETRRILSVQPTYDWTCFSHSLLNVSPMPVESSPPLPCPTPCHLLPNCTSCLDSKGADGGWQHCVWSSSLQQCLSPSYLPLRCMAGGCGRLLRGPESCSLGCAQATQCALCLRRPHCGWCAWGGQDGGGRCMEGGLSGPRDGLTCGRPGASWAFLSCPPEDECANGHHDCNETQNCHDQPHGYECSCKTGYTMDNMTGLCRPVCAQGCVNGSCVEPDHCRCHFGFVGRNCSTECRCNRHSECAGVGARDHCLLCRNHTKGSHCEQCLPLFVGSAVGGGTCRPCHAFCRGNSHICISRKELQMSKGEPKKYSLDPEEIENWVTEGPSEDEAVCVNCQNNSYGEKCESCLQGYFLLDGKCTKCQCNGHADTCNEQDGTGCPCQNNTETGTCQGSSPSDRRDCYKYQCAKCRESFHGSPLGGQQCYRLISVEQECCLDPTSQTNCFHEPKRRALGPGRTVLFGVQPKFTNVDIRLTLDVTFGAVDLYVSTSYDTFVVRVAPDTGVHTVHIQPPPAPPPPPPPADGGPRGAGDPGGAGASSGPGAPAEPRVREVWPRGLITYVTVTEPSAVLVVRGVRDRLVITYPHEHHALKSSRFYLLLLGVGDPSGPGANGSADSQGLLFFRQDQAHIDLFVFFSVFFSCFFLFLSLCVLLWKAKQALDQRQEQRRHLQEMTKMASRPFAKVTVCFPPDPTAPASAWKPAGLPPPAFRRSEPFLAPLLLTGAGGPWGPMGGGCCPPAIPATTAGLRAGPITLEPTEDGMAGVATLLLQLPGGPHAPNGACLGSALVTLRHRLHEYCGGGGGAGGSGHGTGAGRKGLLSQDNLTSMSL

SEQ ID NO: 3333 - protein, 1455 aa, Homo sapiens
MSIAIPLGVTTSDTSYSDMAAGSDPESVEASPAVNEKSVYSTHNYGTTQRHGCRGLPYATIIPRSDLNGLPSPVEERCGDSPNSEGETVPTWCPCGLSQDGFLLNCDKCRGMSRGKVIRLHRRKQDNISGGDSSATESWDEELSPSTVLYTATQHTPTSITLTVRRTKPKKRKKSPEKGRAAPKTKKIKAFREGSRKSLRMKNSPSEAQNLDENTTEGWENRIRLWTDQYEEAFTNQYSADVQNALEQHLHSSKEFVGKPTILDTINKTELACNNTVIGSQMQLQLGRVTRVQKHRKILRAARDLALDTLIIEYRGKVMLRQQFEVNGHFFKKPYPFVLFYSKFNGVEMCVDARTFGNDARFIRRSCTPNAEVRHMIADGMIHLCIYAVSAITKDAEVTIAFDYEYSNCNYKVDCACHKGNRNCPIQKRNPNATELPLLPPPPSLPTIGAETRRRKARRKELEMEQQNEASEENNDQQSQEVPEKVTVSSDHEEVDNPEEKPEEEKEEVIDDQENLAHSRRTREDRKVEAIMHAFENLEKRKKRRDQPLEQSNSDVEITTTTSETPVGEETKTEAPESEVSNSVSNVTIPSTPQSVGVNTRRSSQAGDIAAEKLVPKPPPAKPSRPRPKSRISRYRTSSAQRLKRQKQANAQQAELSQAALEEGGSNSLVTPTEAGSLDSSGENRPLTGSDPTVVSITGSHVNRAASKYPKTKKYLVTEWLNDKAEKQECPVECPLRITTDPTVLATTLNMLPGLIHSPLICTTPKHYIRFGSPFIPERRRRPLLPDGTFSSCKKRWIKQALEEGMTQTSSVPQETRTQHLYQSNENSSSSSICKDNADLLSPLKKWKSRYLMEQNVTKLLRPLSPVTPPPPNSGSKSPQLATPGSSHPGEEECRNGYSLMFSPVTSLTTASRCNTPLQFELCHRKDLDLAKVGYLDSNTNSCADRPSLLNSGHSDLAPHPSLGPTSETGFPSRSGDGHQTLVRNSDQAFRTEFNLMYAYSPLNAMPRADGLYRGSPLVGDRKPLHLDGGYCSPAEGFSSRYEHGLMKDLSRGSLSPGGERACEGVPSAPQNPPQRKKVSLLEYRKRKQEAKENSAGGGGDSAQSKSKSAGAGQGSSNSVSDTGAHGVQGSSARTPSSPHKKFSPSHSSMSHLEAVSPSDSRGTSSSHCRPQENISSRWMVPTSVERLREGGSIPKVLRSSVRVAQKGEPSPTWESNITEKDSDPADGEGPETLSSALSKGATVYSPSRYSYQLLQCDSPRTESQSLLQQSSSPFRGHPTQSPGYSYRTTALRPGNPPSHGSSESSLSSTSYSSPAHPVSTDSLAPFTGTPGYFSSQPHSGNSTGSNLPRRSCPSSAASPTLQGPSDSPTSDSVSQSSTGTLSSTSFPQNSRSSLPSDLRTISLPSAGQSAVYQASRVSAVSNSQHYPHRGSGGVHQYRLQPLQGSGVKTQTGLS

SEQ ID NO: 3334 - protein, 1442 aa, Homo sapiens
MSIAIPLGVTTSDTSYSDMAAGSDPESVEASPAVNEKSVYSTHNYGTTQRHGCRGLPYATIIPRSDLNGLPSPVEERCGDSPNSEGETVPTWCPCGLSQDGFLLNCDKCRGMSRGKVIRLHRRKQDNISGGDSSATESWDEELSPSTVLYTATQHTPTSITLTVRRTKPKKRKKSPEKGRAAPKTKKIKNSPSEAQNLDENTTEGWENRIRLWTDQYEEAFTNQYSADVQNALEQHLHSSKEFVGKPTILDTINKTELACNNTVIGSQMQLQLGRVTRVQKHRKILRAARDLALDTLIIEYRGKVMLRQQFEVNGHFFKKPYPFVLFYSKFNGVEMCVDARTFGNDARFIRRSCTPNAEVRHMIADGMIHLCIYAVSAITKDAEVTIAFDYEYSNCNYKVDCACHKGNRNCPIQKRNPNATELPLLPPPPSLPTIGAETRRRKARRKELEMEQQNEASEENNDQQSQEVPEKVTVSSDHEEVDNPEEKPEEEKEEVIDDQENLAHSRRTREDRKVEAIMHAFENLEKRKKRRDQPLEQSNSDVEITTTTSETPVGEETKTEAPESEVSNSVSNVTIPSTPQSVGVNTRRSSQAGDIAAEKLVPKPPPAKPSRPRPKSRISRYRTSSAQRLKRQKQANAQQAELSQAALEEGGSNSLVTPTEAGSLDSSGENRPLTGSDPTVVSITGSHVNRAASKYPKTKKYLVTEWLNDKAEKQECPVECPLRITTDPTVLATTLNMLPGLIHSPLICTTPKHYIRFGSPFIPERRRRPLLPDGTFSSCKKRWIKQALEEGMTQTSSVPQETRTQHLYQSNENSSSSSICKDNADLLSPLKKWKSRYLMEQNVTKLLRPLSPVTPPPPNSGSKSPQLATPGSSHPGEEECRNGYSLMFSPVTSLTTASRCNTPLQFELCHRKDLDLAKVGYLDSNTNSCADRPSLLNSGHSDLAPHPSLGPTSETGFPSRSGDGHQTLVRNSDQAFRTEFNLMYAYSPLNAMPRADGLYRGSPLVGDRKPLHLDGGYCSPAEGFSSRYEHGLMKDLSRGSLSPGGERACEGVPSAPQNPPQRKKVSLLEYRKRKQEAKENSAGGGGDSAQSKSKSAGAGQGSSNSVSDTGAHGVQGSSARTPSSPHKKFSPSHSSMSHLEAVSPSDSRGTSSSHCRPQENISSRWMVPTSVERLREGGSIPKVLRSSVRVAQKGEPSPTWESNITEKDSDPADGEGPETLSSALSKGATVYSPSRYSYQLLQCDSPRTESQSLLQQSSSPFRGHPTQSPGYSYRTTALRPGNPPSHGSSESSLSSTSYSSPAHPVSTDSLAPFTGTPGYFSSQPHSGNSTGSNLPRRSCPSSAASPTLQGPSDSPTSDSVSQSSTGTLSSTSFPQNSRSSLPSDLRTISLPSAGQSAVYQASRVSAVSNSQHYPHRGSGGVHQYRLQPLQGSGVKTQTGLS

SEQ ID NO: 3335 - protein, 1331 aa, Homo sapiens
MSRGKVIRLHRRKQDNISGGDSSATESWDEELSPSTVLYTATQHTPTSITLTVRRTKPKKRKKSPEKGRAAPKTKKIKNSPSEAQNLDENTTEGWENRIRLWTDQYEEAFTNQYSADVQNALEQHLHSSKEFVGKPTILDTINKTELACNNTVIGSQMQLQLGRVTRVQKHRKILRAARDLALDTLIIEYRGKVMLRQQFEVNGHFFKKPYPFVLFYSKFNGVEMCVDARTFGNDARFIRRSCTPNAEVRHMIADGMIHLCIYAVSAITKDAEVTIAFDYEYSNCNYKVDCACHKGNRNCPIQKRNPNATELPLLPPPPSLPTIGAETRRRKARRKELEMEQQNEASEENNDQQSQEVPEKVTVSSDHEEVDNPEEKPEEEKEEVIDDQENLAHSRRTREDRKVEAIMHAFENLEKRKKRRDQPLEQSNSDVEITTTTSETPVGEETKTEAPESEVSNSVSNVTIPSTPQSVGVNTRRSSQAGDIAAEKLVPKPPPAKPSRPRPKSRISRYRTSSAQRLKRQKQANAQQAELSQAALEEGGSNSLVTPTEAGSLDSSGENRPLTGSDPTVVSITGSHVNRAASKYPKTKKYLVTEWLNDKAEKQECPVECPLRITTDPTVLATTLNMLPGLIHSPLICTTPKHYIRFGSPFIPERRRRPLLPDGTFSSCKKRWIKQALEEGMTQTSSVPQETRTQHLYQSNENSSSSSICKDNADLLSPLKKWKSRYLMEQNVTKLLRPLSPVTPPPPNSGSKSPQLATPGSSHPGEEECRNGYSLMFSPVTSLTTASRCNTPLQFELCHRKDLDLAKVGYLDSNTNSCADRPSLLNSGHSDLAPHPSLGPTSETGFPSRSGDGHQTLVRNSDQAFRTEFNLMYAYSPLNAMPRADGLYRGSPLVGDRKPLHLDGGYCSPAEGFSSRYEHGLMKDLSRGSLSPGGERACEGVPSAPQNPPQRKKVSLLEYRKRKQEAKENSAGGGGDSAQSKSKSAGAGQGSSNSVSDTGAHGVQGSSARTPSSPHKKFSPSHSSMSHLEAVSPSDSRGTSSSHCRPQENISSRWMVPTSVERLREGGSIPKVLRSSVRVAQKGEPSPTWESNITEKDSDPADGEGPETLSSALSKGATVYSPSRYSYQLLQCDSPRTESQSLLQQSSSPFRGHPTQSPGYSYRTTALRPGNPPSHGSSESSLSSTSYSSPAHPVSTDSLAPFTGTPGYFSSQPHSGNSTGSNLPRRSCPSSAASPTLQGPSDSPTSDSVSQSSTGTLSSTSFPQNSRSSLPSDLRTISLPSAGQSAVYQASRVSAVSNSQHYPHRGSGGVHQYRLQPLQGSGVKTQTGLS

SEQ ID NO: 3336 - protein, 908 aa, Homo sapiens
MCVDARTFGNDARFIRRSCTPNAEVRHMIADGMIHLCIYAVSAITKDAEVTIAFDYEYSNCNYKVDCACHKGNRNCPIQKRNPNATELPLLPPPPSLPTIGAETRRRKARRKELEMEQQNEASEENNDQQSQEVPEKVTVSSDHEEVDNPEEKPEEEKEEVIDDQENLAHSRRTREDRKVEAIMHAFENLEKRKKRRDQPLEQSNSDVEITTTTSETPVGEETKTEAPESEVSNSVSNVTIPSTPQSVGVNTRRSSQAGDIAAEKLVPKPPPAKPSRPRPKSRISRYRTSSAQRLKRQKQANAQQAELSQAALEEGGSNSLVTPTEAGSLDSSGENRPLTGSDPTVVSITGSHVNRAASKYPKTKKYLVTEWLNDKAEKQECPVECPLRITTDPTVLATTLNMLPGLIHSPLICTTPKHYIRFGSPFIPERRRRPLLPDGTFSSCKKRWIKQALEEGMTQTSSVPQETRTQHLYQSNENSSSSSICKDNADLLSPLKKWKSRYLMEQNVTKLLRPLSPVTPPPPNSGSKSPQLATPGSSHPGEEECRNGYSLMFSPVTSLTTASRCNTPLQFELCHRKDLDLAKVGYLDSNTNSCADRPSLLNSGHSDLAPHPSLGPTSETGFPSRSGDGHQTLVRNSDQAFRTEFNLMYAYSPLNAMPRADGLYRGSPLVGDRKPLHLDGGYCSPAEGFSSRYEHGLMKDLSRGSLSPGGERACEGVPSAPQNPPQRKKVSLLEYRKRKQEAKENSAGGGGDSAQSKSKSAGAGQGSSNSVSDTGAHGVQGSSARTPSSPHKKFSPSHSSMSHLEAVSPSDSRGTSSSHCRPQENISSRWMVPTSVERLREGGSIPKVLRSSVRVAQKGEPSPTWESNITEKDSDPADGEGPETLSSALSKGATVYSPSRYSYQICD

SEQ ID NO: 3337 - protein, 333 aa, Homo sapiens
MSIAIPLGVTTSDTSYSDMAAGSDPESVEASPAVNEKSVYSTHNYGTTQRHGCRGLPYATIIPRSDLNGLPSPVEERCGDSPNSEGETVPTWCPCGLSQDGFLLNCDKCRGMSRGKVIRLHRRKQDNISGGDSSATESWDEELSPSTVLYTATQHTPTSITLTVRRTKPKKRKKSPEKGRAAPKTKKIKAFREGSRKSLRMKNSPSEAQNLDENTTEGWENRIRLWTDQYEEAFTNQYSADVQNALEQHLHSSKEFVGKPTILDTINKTELACNNTVIGSQMQLQLGRVTRVQKHRKILRAARDLALDTLIIEYRGKVMLRQQFEVNGHFFKK

SEQ ID NO: 3338 - protein, 202 aa, Homo sapiens
MHAFENLEKRKKRRDQPLEQSNSDVEITTTTSETPVGEETKTEAPESEVSNSVSNVTIPSTPQSVGVNTRRSSQAGDIAAEKLVPKPPPAKPSRPRPKSRISRYRTSSAQRLKRQKQANAQQAELSQAALEEGGSNSLVTPTEAGSLDSSGENRPLTGSDPTVVSITGSHVNRAASKYPKTKKVSHKCILYKSSLARAVLVK

SEQ ID NO: 3339 - protein, 117 aa, Homo sapiens
MEVLRDPIKKNSSESKPAQSGFSRGNSPLSCPESVEASPAVNEKSVYSTHNYGTTQRHGCRGLPYATIIPRSDLNGLPSPVEERCGDSPNSEGETVPTWCPCGLSQDGFLLNCDKCR

SEQ ID NO: 3340 - protein, 145 aa, Homo sapiens
MIADGMIHLCIYAVSAITKDAEVTIAFDYEYSNCNYKVDCACHKGNRNCPIQKRNPNATELPLLPPPPSLPTIGAETRRRKARRKELEMEQQNEASEENNDQQSQEVPEKVTVSSDHEVIAPGQMMMLWHQSSKGRGTRVAAWFK

SEQ ID NO: 3341 - protein, 705 aa, Homo sapiens [sequence omitted]

SEQ ID NO: 3342 - protein, 924 aa, Homo sapiens
MHAFENLEKRKKRRDQPLEQSNSDVEITTTTSETPVGEETKTEAPESEVSNSVSNVTIPSTPQSVGVNTRRSSQAGDIAAEKLVPKPPPAKPSRPRPKSRISRYRTSSAQRLKRQKQANAQQAELSQAALEEGGSNSLVTPTEAGSLDSSGENRPLTGSDPTVVSITGSHVNRAASKYPKTKKYLVTEWLNDKAEKQECPVECPLRITTDPTVLATTLNMLPGLIHSPLICTTPKHYIRFGSPFIPERRRRPLLPDGTFSSCKKRWIKQALEEGMTQTSSVPQETRTQHLYQSNENSSSSSICKDNADLLSPLKKWKSRYLMEQNVTKLLRPLSPVTPPPPNSGSKSPQLATPGSSHPGEEECRNGYSLMFSPVTSLTTASRCNTPLQFELCHRKDLDLAKVGYLDSNTNSCADRPSLLNSGHSDLAPHPSLGPTSETGFPSRSGDGHQTLVRNSDQAFRTEFNLMYAYSPLNAMPRADGLYRGSPLVGDRKPLHLDGGYCSPAEGFSSRYEHGLMKDLSRGSLSPGGERACEGVPSAPQNPPQRKKVSLLEYRKRKQEAKENSAGGGGDSAQSKSKSAGAGQGSSNSVSDTGAHGVQGSSARTPSSPHKKFSPSHSSMSHLEAVSPSDSRGTSSSHCRPQENISSRWMVPTSVERLREGGSIPKVLRSSVRVAQKGEPSPTWESNITEKDSDPADGEGPETLSSALSKGATVYSPSRYSYQLLQCDSPRTESQSLLQQSSSPFRGHPTQSPGYSYRTTALRPGNPPSHGSSESSLSSTSYSSPAHPVSTDSLAPFTGTPGYFSSQPHSGNSTGSNLPRRSCPSSAASPTLQGPSDSPTSDSVSQSSTGTLSSTSFPQNSRSSLPSDLRTISLPSAGQSAVYQASRVSAVSNSQHYPHRGSGGVHQYRLQPLQGSGVKTQTGLS

SEQ ID NO: 3343 - protein, 931 aa, Homo sapiens
MSIAIPLGVTTSDTSYSDMAAGSDPESVEASPAVNEKSVYSTHNYGTTQRHGCRGLPYATIIPRSDLNGLPSPVEERCGDSPNSEGETVPTWCPCGLSQDGFLLNCDKCRGMSRGKVIRLHRRKQDNISGGDSSATESWDEELSPSTVLYTATQHTPTSITLTVRRTKPKKRKKSPEKGRAAPKTKKIKNSPSEAQNLDENTTEGWENRIRLWTDQYEEAFTNQYSADVQNALEQHLHSSKEFVGKPTILDTINKTELACNNTVIGSQMQLQLGRVTRVQKHRKILRAARDLALDTLIIEYRGKVMLRQQFEVNGHFFKKPYPFVLFYSKFNGVEMCVDARTFGNDARFIRRSCTPNAEVRHMIADGMIHLCIYAVSAITKDAEVTIAFDYEYSNCNYKVDCACHKGNRNCPIQKRNPNATELPLLPPPPSLPTIGAETRRRKARRKELEMEQQNEASEENNDQQSQEVPEKVTVSSDHEEVDNPEEKPEEEKEEVIDDQENLAHSRRTREDRKVEAIMHAFENLEKRKKRRDQPLEQSNSDVEITTTTSETPVGEETKTEAPESEVSNSVSNVTIPSTPQSVGVNTRRSSQAGDIAAEKLVPKPPPAKPSRPRPKSRISRYRTSSAQRLKRQKQANAQQAELSQAALEEGGSNSLVTPTEAGSLDSSGENRPLTGSDPTVVSITGSHVNRAASKYPKTKKYLVTEWLNDKAEKQECPVECPLRITTDPTVLATTLNMLPGLIHSPLICTTPKHYIRFGSPFIPERRRRPLLPDGTFSSCKKRWIKQALEEGMTQTSSVPQETRTQHLYQSNENSSSSSICKDNADLLSPLKKWKSRYLMEQNVTKLLRPLSPVTPPPPNSGSKSPQLATPGSSHPGEEECRNGYSLMFSPVTSLTTASRCNTPLQFEVIWVWLLGVLDMKIIICTFSFQI

SEQ ID NO: 3344 - protein, 279 aa, Homo sapiens
MSIAIPLGVTTSDTSYSDMAAGSDPESVEASPAVNEKSVYSTHNYGTTQRHGCRGLPYATIIPRSDLNGLPSPVEERCGDSPNSEGETVPTWCPCGLSQDGFLLNCDKCRGMSRGKVIRLHRRKQDNISGGDSSATESWDEELSPSTVLYTATQHTPTSITLTVRRTKPKKRKKSPEKGRAAPKTKKIKNSPSEAQNLDENTTEGWENRIRLWTDQYEEAFTNQYSADVQNALEQHLHSSKEFVGKPTILDTINKTELACNNTVIGSQMQVSTKGLRTL

SEQ ID NO: 3345 - protein, 507 aa, Homo sapiens
MSIAIPLGVTTSDTSYSDMAAGSDPESVEASPAVNEKSVYSTHNYGTTQRHGCRGLPYATIIPRSDLNGLPSPVEERCGDSPNSEGETVPTWCPCGLSQDGFLLNCDKCRGMSRGKVIRLHRRKQDNISGGDSSATESWDEELSPSTVLYTATQHTPTSITLTVRRTKPKKRKKSPEKGRAAPKTKKIKNSPSEAQNLDENTTEGWENRIRLWTDQYEEAFTNQYSADVQNALEQHLHSSKEFVGKPTILDTINKTELACNNTVIGSQMQLQLGRVTRVQKHRKILRAARDLALDTLIIEYRGKVMLRQQFEVNGHFFKKPYPFVLFYSKFNGVEMCVDARTFGNDARFIRRSCTPNAEVRHMIADGMIHLCIYAVSAITKDAEVTIAFDYEYSNCNYKVDCACHKGNRNCPIQKRNPNATELPLLPPPPSLPTIGAETRRRKARRKELEMEQQNEASEENNDQQSQEVPEKVTVSSDHEVIAPGQMMMLWHQSSKGRGTRVAAWFK

SEQ ID NO: 3346 - protein, 912 aa, Homo sapiens
MSQLTLAFCFITFLVEAKKQRDHNYGAPPPPTPPASPPVQTIIPRSDLNGLPSPVEERCGDSPNSEGETVPTWCPCGLSQDGFLLNCDKCRGMSRGKVIRLHRRKQDNISGGDSSATESWDEELSPSTVLYTATQHTPTSITLTVRRTKPKKRKKSPEKGRAAPKTKKIKNSPSEAQNLDENTTEGWENRIRLWTDQYEEAFTNQYSADVQNALEQHLHSSKEFVGKPTILDTINKTELACNNTVIGSQMQLQLGRVTRVQKHRKILRAARDLALDTLIIEYRGKVMLRQQFEVNGHFFKKPYPFVLFYSKFNGVEMCVDARTFGNDARFIRRSCTPNAEVRHMIADGMIHLCIYAVSAITKDAEVTIAFDYEYSNCNYKVDCACHKGNRNCPIQKRNPNATELPLLPPPPSLPTIGAETRRRKARRKELEMEQQNEASEENNDQQSQEVPEKVTVSSDHEEVDNPEEKPEEEKEEVIDDQENLAHSRRTREDRKVEAIMHAFENLEKRKKRRDQPLEQSNSDVEITTTTSETPVGEETKTEAPESEVSNSVSNVTIPSTPQSVGVNTRRSSQAGDIAAEKLVPKPPPAKPSRPRPKSRISRYRTSSAQRLKRQKQANAQQAELSQAALEEGGSNSLVTPTEAGSLDSSGENRPLTGSDPTVVSITGSHVNRAASKYPKTKKYLVTEWLNDKAEKQECPVECPLRITTDPTVLATTLNMLPGLIHSPLICTTPKHYIRFGSPFIPERRRRPLLPDGTFSSCKKRWIKQALEEGMTQTSSVPQETRTQHLYQSNENSSSSSICKDNADLLSPLKKWKSRYLMEQNVTKLLRPLSPVTPPPPNSGSKSPQLATPGSSHPGEEECRNGYSLMFSPVTSLTTASRCNTPLQFEVIWVWLLGVLDMKIIICTFSFQI

SEQ ID NO: 3347 - protein, 1166 aa, Homo sapiens
MSIAIPLGVTTSDTSYSDMAAGSDPESVEASPAVNEKSVYSTHNYGTTQRHGCRGLPYATIIPRSDLNGLPSPVEERCGDSPNSEGETVPTWCPCGLSQDGFLLNCDKCRGMSRGKVIRLHRRKQDNISGGDSSATESWDEELSPSTVLYTATQHTPTSITLTVRRTKPKKRKKSPEKGRAAPKTKKIKNSPSEAQNLDENTTEGWENRIRLWTDQYEEAFTNQYSADVQNALEQHLHSSKEFVGKPTILDTINKTELACNNTVIGSQMQLQLGRVTRVQKHRKILRAARDLALDTLIIEYRGKVMLRQQFEVNGHFFKKPYPFVLFYSKFNGVEMCVDARTFGNDARFIRRSCTPNAEVRHMIADGMIHLCIYAVSAITKDAEVTIAFDYEYSNCNYKVDCACHKGNRNCPIQKRNPNATELPLLPPPPSLPTIGAETRRRKARRKELEMEQQNEASEENNDQQSQEVPEKVTVSSDHEEVDNPEEKPEEEKEEVIDDQENLAHSRRTREDRKVEAIMHAFENLEKRKKRRDQPLEQSNSDVEITTTTSETPVGEETKTEAPESEVSNSVSNVTIPSTPQSVGVNTRRSSQAGDIAAEKLVPKPPPAKPSRPRPKSRISRYRTSSAQRLKRQKQANAQQAELSQAALEEGGSNSLVTPTEAGSLDSSGENRPLTGSDPTVVSITGSHVNRAASKYPKTKKYLVTEWLNDKAEKQECPVECPLRITTDPTVLATTLNMLPGLIHSPLICTTPKHYIRFGSPFIPERRRRPLLPDGTFSSCKKRWIKQALEEGMTQTSSVPQETRTQHLYQSNENSSSSSICKDNADLLSPLKKWKSRYLMEQNVTKLLRPLSPVTPPPPNSGSKSPQLATPGSSHPGEEECRNGYSLMFSPVTSLTTASRCNTPLQFELCHRKDLDLAKVGYLDSNTNSCADRPSLLNSGHSDLAPHPSLGPTSETGFPSRSGDGHQTLVRNSDQAFRTEFNLMYAYSPLNAMPRADGLYRGSPLVGDRKPLHLDGGYCSPAEGFSSRYEHGLMKDLSRGSLSPGGERACEGVPSAPQNPPQRKKVSLLEYRKRKQEAKENSAGGGGDSAQSKSKSAGAGQGSSNSVSDTGAHGVQGSSARTPSSPHKKFSPSHSSMSHLEAVSPSDSRGTSSSHCRPQENISSRW

SEQ ID NO: 3348 - protein, 1242 aa, Homo sapiens
MSIAIPLGVTTSDTSYSDMAAGSDPESVEASPAVNEKSVYSTHNYGTTQRHGCRGLPYATIIPRSDLNGLPSPVEERCGDSPNSEGETVPTWCPCGLSQDGFLLNCDKCRGMSRGKVIRLHRRKQDNISGGDSSATESWDEELSPSTVLYTATQHTPTSITLTVRRTKPKKRKKSPEKGRAAPKTKKIKNSPSEAQNLDENTTEGWENRIRLWTDQYEEAFTNQYSADVQNALEQHLHSSKEFVGKPTILDTINKTELACNNTVIGSQMQLQLGRVTRVQKHRKILRAARDLALDTLIIEYRGKVMLRQQFEVNGHFFKKPYPFVLFYSKFNGVEMCVDARTFGNDARFIRRSCTPNAEVRHMIADGMIHLCIYAVSAITKDAEVTIAFDYEYSNCNYKVDCACHKGNRNCPIQKRNPNATELPLLPPPPSLPTIGAETRRRKARRKELEMEQQNEASEENNDQQSQEVPEKVTVSSDHEEVDNPEEKPEEEKEEVIDDQENLAHSRRTREDRKVEAIMHAFENLEKRKKRRDQPLEQSNSDVEITTTTSETPVGEETKTEAPESEVSNSVSNVTIPSTPQSVGVNTRRSSQAGDIAAEKLVPKPPPAKPSRPRPKSRISRYRTSSAQRLKRQKQANAQQAELSQAALEEGGSNSLVTPTEAGSLDSSGENRPLTGSDPTVVSITGSHVNRAASKYPKTKKYLVTEWLNDKAEKQECPVECPLRITTDPTVLATTLNMLPGLIHSPLICTTPKHYIRFGSPFIPERRRRPLLPDGTFSSCKKRWIKQALEEGMTQTSSVPQETRTQHLYQSNENSSSSSICKDNADLLSPLKKWKSRYLMEQNVTKLLRPLSPVTPPPPNSGSKSPQLATPGSSHPGEEECRNGYSLMFSPVTSLTTASRCNTPLQFELCHRKDLDLAKVGYLDSNTNSCADRPSLLNSGHSDLAPHPSLGPTSETGFPSRSGDGHQTLVRNSDQAFRTEFNLMYAYSPLNAMPRADGLYRGSPLVGDRKPLHLDGGYCSPAEGFSSRYEHGLMKDLSRGSLSPGGERACEGVPSAPQNPPQRKKVSLLEYRKRKQEAKENSAGGGGDSAQSKSKSAGAGQGSSNSVSDTGAHGVQGSSARTPSSPHKKFSPSHSSMSHLEAVSPSDSRGTSSSHCRPQENISSRWMVPTSVERLREGGSIPKVLRSSVRVAQKGEPSPTWESNITEKDSDPADGEGPETLSSALSKGATVYSPSRYSYQVR

SEQ ID NO: 3349 - protein, 1461 aa, Homo sapiens
MSIAIPLGVTTSDTSYSDMAAGSDPESVEASPAVNEKSVYSTHNYGTTQRHGCRGLPYATIIPRSDLNGLPSPVEERCGDSPNSEGETVPTWCPCGLSQDGFLLNCDKCRGMSRGKVIRLHRRKQDNISGGDSSATESWDEELSPSTVLYTATQHTPTSITLTVRRTKPKKRKKSPEKGRAAPKTKKIKNSPSEAQNLDENTTEGWENRIRLWTDQYEEAFTNQYSADVQNALEQHLHSSKEFVGKPTILDTINKTELACNNTVIGSQMQLQLGRVTRVQKHRKILRAARDLALDTLIIEYRGKVMLRQQFEVNGHFFKKPYPFVLFYSKFNGVEMCVDARTFGNDARFIRRSCTPNAEVRHMIADGMIHLCIYAVSAITKDAEVTIAFDYEYSNCNYKVDCACHKGNRNCPIQKRNPNATELPLLPPPPSLPTIGAETRRRKARRKELEMEQQNEASEENNDQQSQEVPEKVTVSSDHEEVDNPEEKPEEEKEEVIDDQENLAHSRRTREDRKVEAIMHAFENLEKRKKRRDQPLEQSNSDVEITTTTSETPVGEETKTEAPESEVSNSVSNVTIPSTPQSVGVNTRRSSQAGDIAAEKLVPKPPPAKPSRPRPKSRISRYRTSSAQRLKRQKQANAQQAELSQAALEEGGSNSLVTPTEAGSLDSSGENRPLTGSDPTVVSITGSHVNRAASKYPKTKKYLVTEWLNDKAEKQECPVECPLRITTDPTVLATTLNMLPGLIHSPLICTTPKHYIRFGSPFIPERRRRPLLPDGTFSSCKKRWIKQALEEGMTQTSSVPQETRTQHLYQSNENSSSSSICKDNADLLSPLKKWKSRYLMEQNVTKLLRPLSPVTPPPPNSGSKSPQLATPGSSHPGEEECRNGYSLMFSPVTSLTTASRCNTPLQFENISSPESSPAHRPESLSPELCHRKDLDLAKVGYLDSNTNSCADRPSLLNSGHSDLAPHPSLGPTSETGFPSRSGDGHQTLVRNSDQAFRTEFNLMYAYSPLNAMPRADGLYRGSPLVGDRKPLHLDGGYCSPAEGFSSRYEHGLMKDLSRGSLSPGGERACEGVPSAPQNPPQRKKVSLLEYRKRKQEAKENSAGGGGDSAQSKSKSAGAGQGSSNSVSDTGAHGVQGSSARTPSSPHKKFSPSHSSMSHLEAVSPSDSRGTSSSHCRPQENISSRWMVPTSVERLREGGSIPKVLRSSVRVAQKGEPSPTWESNITEKDSDPADGEGPETLSSALSKGATVYSPSRYSYQLLQCDSPRTESQSLLQQSSSPFRGHPTQSPGYSYRTTALRPGNPPSHGSSESSLSSTSYSSPAHPVSTDSLAPFTGTPGYFSSQPHSGNSTGSNLPRRSCPSSAASPTLQGPSDSPTSDSVSQSSTGTLSSTSFPQNSRSSLPSDLRTISLPSAGQSAVYQASRVSAVSNSQHYPHRGSGGVHQYRLQPLQGSGVKTQTGLS

SEQ ID NO: 3350 - protein, 992 aa, Homo sapiens
MEQQNEASEENNDQQSQEVPEKVTVSSDHEEVDNPEEKPEEEKEEVIDDQENLAHSRRTREDRKVEAIMHAFENLEKRKKRRDQPLEQSNSDVEITTTTSETPVGEETKTEAPESEVSNSVSNVTIPSTPQSVGVNTRRSSQAGDIAAEKLVPKPPPAKPSRPRPKSRISRYRTSSAQRLKRQKQANAQQAELSQAALEEGGSNSLVTPTEAGSLDSSGENRPLTGSDPTVVSITGSHVNRAASKYPKTKKYLVTEWLNDKAEKQECPVECPLRITTDPTVLATTLNMLPGLIHSPLICTTPKHYIRFGSPFIPERRRRPLLPDGTFSSCKKRWIKQALEEGMTQTSSVPQETRTQHLYQSNENSSSSSICKDNADLLSPLKKWKSRYLMEQNVTKLLRPLSPVTPPPPNSGSKSPQLATPGSSHPGEEECRNGYSLMFSPVTSLTTASRCNTPLQFELCHRKDLDLAKVGYLDSNTNSCADRPSLLNSGHSDLAPHPSLGPTSETGFPSRSGDGHQTLVRNSDQAFRTEFNLMYAYSPLNAMPRADGLYRGSPLVGDRKPLHLDGGYCSPAEGFSSRYEHGLMKDLSRGSLSPGGERACEGVPSAPQNPPQRKKVSLLEYRKRKQEAKENSAGGGGDSAQSKSKSAGAGQGSSNSVSDTGAHGVQGSSARTPSSPHKKFSPSHSSMSHLEAVSPSDSRGTSSSHCRPQENISSRWMVPTSVERLREGGSIPKVLRSSVRVAQKGEPSPTWESNITEKDSDPADGEGPETLSSALSKGATVYSPSRYSYQLLQCDSPRTESQSLLQQSSSPFRGHPTQSPGYSYRTTALRPGNPPSHGSSESSLSSTSYSSPAHPVSTDSLAPFTGTPGYFSSQPHSGNSTGSNLPRRSCPSSAASPTLQGPSDSPTSDSVSQSSTGTLSSTSFPQNSRSSLPSDLRTISLPSAGQSAVYQASRVSAVSNSQHYPHRGSGGVHQYRLQPLQGSGVKTQTGLS

SEQ ID NO: 3351 - protein, 1080 aa, Homo sapiens [sequence omitted]

SEQ ID NO: 3352 - protein, 1455 aa, Homo sapiens; identical to SEQ ID NO: 3333

SEQ ID NO: 3353 - protein, 1331 aa, Homo sapiens; identical to SEQ ID NO: 3335

SEQ ID NO: 3354 - protein, 1344 aa, Homo sapiens
MSRGKVIRLHRRKQDNISGGDSSATESWDEELSPSTVLYTATQHTPTSITLTVRRTKPKKRKKSPEKGRAAPKTKKIKAFREGSRKSLRMKNSPSEAQNLDENTTEGWENRIRLWTDQYEEAFTNQYSADVQNALEQHLHSSKEFVGKPTILDTINKTELACNNTVIGSQMQLQLGRVTRVQKHRKILRAARDLALDTLIIEYRGKVMLRQQFEVNGHFFKKPYPFVLFYSKFNGVEMCVDARTFGNDARFIRRSCTPNAEVRHMIADGMIHLCIYAVSAITKDAEVTIAFDYEYSNCNYKVDCACHKGNRNCPIQKRNPNATELPLLPPPPSLPTIGAETRRRKARRKELEMEQQNEASEENNDQQSQEVPEKVTVSSDHEEVDNPEEKPEEEKEEVIDDQENLAHSRRTREDRKVEAIMHAFENLEKRKKRRDQPLEQSNSDVEITTTTSETPVGEETKTEAPESEVSNSVSNVTIPSTPQSVGVNTRRSSQAGDIAAEKLVPKPPPAKPSRPRPKSRISRYRTSSAQRLKRQKQANAQQAELSQAALEEGGSNSLVTPTEAGSLDSSGENRPLTGSDPTVVSITGSHVNRAASKYPKTKKYLVTEWLNDKAEKQECPVECPLRITTDPTVLATTLNMLPGLIHSPLICTTPKHYIRFGSPFIPERRRRPLLPDGTFSSCKKRWIKQALEEGMTQTSSVPQETRTQHLYQSNENSSSSSICKDNADLLSPLKKWKSRYLMEQNVTKLLRPLSPVTPPPPNSGSKSPQLATPGSSHPGEEECRNGYSLMFSPVTSLTTASRCNTPLQFELCHRKDLDLAKVGYLDSNTNSCADRPSLLNSGHSDLAPHPSLGPTSETGFPSRSGDGHQTLVRNSDQAFRTEFNLMYAYSPLNAMPRADGLYRGSPLVGDRKPLHLDGGYCSPAEGFSSRYEHGLMKDLSRGSLSPGGERACEGVPSAPQNPPQRKKVSLLEYRKRKQEAKENSAGGGGDSAQSKSKSAGAGQGSSNSVSDTGAHGVQGSSARTPSSPHKKFSPSHSSMSHLEAVSPSDSRGTSSSHCRPQENISSRWMVPTSVERLREGGSIPKVLRSSVRVAQKGEPSPTWESNITEKDSDPADGEGPETLSSALSKGATVYSPSRYSYQLLQCDSPRTESQSLLQQSSSPFRGHPTQSPGYSYRTTALRPGNPPSHGSSESSLSSTSYSSPAHPVSTDSLAPFTGTPGYFSSQPHSGNSTGSNLPRRSCPSSAASPTLQGPSDSPTSDSVSQSSTGTLSSTSFPQNSRSSLPSDLRTISLPSAGQSAVYQASRVSAVSNSQHYPHRGSGGVHQYRLQPLQGSGVKTQTGLS

SEQ ID NO: 3355 - protein, 1442 aa, Homo sapiens; identical to SEQ ID NO: 3334

SEQ ID NO: 3356 - protein, 1331 aa, Homo sapiens; identical to SEQ ID NO: 3335

SEQ ID NO: 3357 - protein, 1455 aa, Homo sapiens; identical to SEQ ID NO: 3333

SEQ ID NO: 3358 - protein, 908 aa, Homo sapiens; identical to SEQ ID NO: 3336

SEQ ID NO: 3359 - protein, 333 aa, Homo sapiens; identical to SEQ ID NO: 3337

SEQ ID NO: 3360 - protein, 202 aa, Homo sapiens; identical to SEQ ID NO: 3338

SEQ ID NO: 3361 - protein, 145 aa, Homo sapiens; identical to SEQ ID NO: 3340

SEQ ID NO: 3362 - protein, 705 aa, Homo sapiens [sequence omitted]

SEQ ID NO: 3363 - protein, 117 aa, Homo sapiens; identical to SEQ ID NO: 3339

SEQ ID NO: 3364 - protein, 924 aa, Homo sapiens; identical to SEQ ID NO: 3342

SEQ ID NO: 3365 - protein, 931 aa, Homo sapiens; identical to SEQ ID NO: 3343

SEQ ID NO: 3366 - protein, 279 aa, Homo sapiens; identical to SEQ ID NO: 3344

SEQ ID NO: 3367 - protein, 507 aa, Homo sapiens; identical to SEQ ID NO: 3345

SEQ ID NO: 3368 - protein, 912 aa, Homo sapiens; identical to SEQ ID NO: 3346

SEQ ID NO: 3369 - protein, 1166 aa, Homo sapiens; identical to SEQ ID NO: 3347

SEQ ID NO: 3370 - protein, 1242 aa, Homo sapiens; identical to SEQ ID NO: 3348

SEQ ID NO: 3371 - protein, 1461 aa, Homo sapiens; identical to SEQ ID NO: 3349

SEQ ID NO: 3372 - protein, 992 aa, Homo sapiens; identical to SEQ ID NO: 3350

SEQ ID NO: 3373 - protein, 1080 aa, Homo sapiens [sequence omitted]

SEQ ID NO: 3374 - protein, 1455 aa, Homo sapiens; identical to SEQ ID NO: 3333

SEQ ID NO: 3375 - protein, 1331 aa, Homo sapiens; identical to SEQ ID NO: 3335

SEQ ID NO: 3376 - protein, 1344 aa, Homo sapiens; identical to SEQ ID NO: 3354

SEQ ID NO: 3377 - protein, 953 aa, Homo sapiens
MAETLPGSGDSGPGTASLGPGVAETGTRRLSELRVIDLRAELKKRNLDTGGNKSVLMERLKKAVKEEGQDPDEIGIELEATSKKSAKRCVKGLKMEEEGTEDNGLEDDSRDGQEDMEASLENLQNMGMMDMSVLDETEVANSSAPDFGEDGTDGLLDSFCDSKEYVAAQLRQLPAQPPEHAVDGEGFKNTLETSSLNFKVTPDIEESLLEPENEKILDILGETCKSEPVKEESSELEQPFAQDTSSVGPDRKLAEEEDLFDSAHPEEGDLDLASESTAHAQSSKADSLLAVVKREPAEQPGDGERTDCEPVGLEPAVEQSSAASELAEASSEELAEAPTEAPSPEARDSKEDGRKFDFDACNEVPPAPKESSTSEGADQKMSSFKEEKDIKPIIKDEKGRVGSGSGRNLWVSGLSSTTRATDLKNLFSKYGKVVGAKVVTNARSPGARCYGFVTMSTSDEATKCISHLHRTELHGRMISVEKAKNEPAGKKLSDRKECEVKKEKLSSVDRHHSVEIKIEKTVIKKEEKIEKKEEKKPEDIKKEEKDQDELKPGPTNRSRVTKSGSRGMERTVVMDKSKGEPVISVKTTSRSKERSSKSQDRKSESKEKRDILSFDKIKEQRERERQRQREREIRETERRREREQREREQRLEAFHERKEKARLQRERLQLECQRQRLERERMERERLERERMRVERERRKEQERIHREREELRRQQEQLRYEQERRPGRRPYDLDRRDDAYWPEGKRVAMEDRYRADFPRPDHRFHDFDHRDRGQYQDHAIDRREGSRPMMGDHRDGQHYGDDRHGHGGPPERHGRDSRDGWGGYGSDKRLSEGRGLPPPPRGGRDWGEHNQRLEEHQARAWQGAMDAGAASREHARWQGGERGLSGPSGPGHMASRGGVAGRGGFAQGGHSQGHVVPGGGLEGGGVASQDRGSRVPHPHPHPPPYPHFTRRY

SEQ ID NO: 3378 - protein, 616 aa, Homo sapiens
MFRTAVMMAASLALTGAVVAHAYYLKHQFYPTVVYLTKSSPSMAVLYIQAFVLVFLLGKVMGKVFFGQLRAAEMEHLLERSWYAVTETCLAFTVFRDDFSPRFVALFTLLLFLKCFHWLAEDRVDFMERSPNISWLFHCRIVSLMFLLGILDFLFVSHAYHSILTRGASVQLVFGFEYAILMTMVLTIFIKYVLHSVDLQSENPWDNKAVYMLYTELFTGFIKVLLYMAFMTIMIKVHTFPLFAIRPMYLAMRQFKKAVTDAIMSRRAIRNMNTLYPDATPEELQAMDNVCIICREEMVTGAKRLPCNHIFHTSCLRSWFQRQQTCPTCRMDVLRASLPAQSPPPPEPADQGPPPAPHPPPLLPQPPNFPQGLLPPFPPGMFPLWPPMGPFPPVPPPPSSGEAVAPPSTSAALSRPSGAATTTAAGTSATAASATASGPGSGSAPEAGPAPGFPFPPPWMGMPLPPPFAFPPMPVPPAGFAGLTPEELRALEGHERQHLEARLQSLRNIHTLLDAAMLQINQYLTVLASLGPPRPATSVNSTEETATTVVAAASSTSIPSSEATTPTPGASPPAPEMERPPAPESVGTEEMPEDGEPDAAELRRRRLQKLESPVAH

SEQ ID NO: 3379 - protein, 617 aa, Homo sapiens
MFRTAVMMAASLALTGAVVAHAYYLKHQFYPTVVYLTKSSPSMAVLYIQAFVLVFLLGKVMGKVFFGQLRAAEMEHLLERSWYAVTETCLAFTVFRDDFSPRFVALFTLLLFLKCFHWLAEDRVDFMERSPNISWLFHCRIVSLMFLLGILDFLFVSHAYHSILTRGASVQLVFGFEYAILMTMVLTIFIKYVLHSVDLQSENPWDNKAVYMLYTELFTGFIKVLLYMAFMTIMIKVHTFPLFAIRPMYLAMRQFKKAVTDAIMSRRAIRNMNTLYPDATPEELQAMDNVCIICREEMVTGAKRLPCNHIFHTSCLRSWFQRQQTCPTCRMDVLRASLPAQSPPPPEPADQGPPPAPHPPPLLPQPPNFPQGLLPPFPPGMFPLWPPMGPFPPVPPPPSSGEAVAPPSTSAAALSRPSGAATTTAAGTSATAASATASGPGSGSAPEAGPAPGFPFPPPWMGMPLPPPFAFPPMPVPPAGFAGLTPEELRALEGHERQHLEARLQSLRNIHTLLDAAMLQINQYLTVLASLGPPRPATSVNSTEETATTVVAAASSTSIPSSEATTPTPGASPPAPEMERPPAPESVGTEEMPEDGEPDAAELRRRRLQKLESPVAH

SEQ ID NO: 3380 - protein, 897 aa, Homo sapiens
MEQLADVTLRRLLDNEVFDLDPDLQEPSQITKRDLEARAQNEFFRAFFRLPRKEKLHAVVDCSLWTPFSRCHTAGRMFASDSYICFASREDGCCKIILPLREVVSIEKMEDTSLLPHPIIVSIRSKVAFQFIELRDRDSLVEALLARLKQVHANHPVHYDTSADDDMASLVFHSTSMCSDHRFGDLEMMSSQNSEESEKEKSPLMHPDALVTAFQQSGSQSPDSRMSREQIKISLWNDHFVEYGRTVCMFRTEKIRKLVAMGIPESLRGRLWLLFSDAVTDLASHPGYYGNLVEESLGKCCLVTEEIERDLHRSLPEHPAFQNETGIAALRRVLTAYAHRNPKIGYCQSMNILTSVLLLYTKEEEAFWLLVAVCERMLPDYFNHRVIGAQVDQSVFEELIKGHLPELAEHMNDLSALASVSLSWFLTLFLSIMPLESAVNVVDCFFYDGIKAIFQLGLAVLEANAEDLCSSKDDGQALMILSRFLDHIKNEDSPGPPVGSHHAFFSDDQEPYPVTDISDLIRDSYEKFGDQSVEQIEHLRYKHRIRVLQGHEDTTKQNVLRVVIPEVSILPEDLEELYDLFKREHMMSCYWEQPRPMASRHDPSRPYAEQYRIDARQFAHLFQLVSPWTCGAHTEILAERTFRLLDDNMDQLIEFKAFVSCLDIMYNGEMNEKIKLLYRLHIPPALTENDRDSQSPLRNPLLSTSRPLVFGKPNGDAVDYQKQLKQMIKDLAKEKDKTEKELPKMSQREFIQFCKTLYSMFHEDPEENDLYQAIATVTTLLLQIGEVGQRGSSSGSCSQECGEELRASAPSPEDSVFADTGKTPQDSQALPEAAERDWTVSLEHILASLLTEQSLVNFFEKPLDMKSKLENAKINQYNLKTFEMSHQSQSELKLSNL

SEQ ID NO: 3381 - protein, 669 aa, Homo sapiens
MAAAQEADGARSAVVAAGGGSSGQVTSNGSIGRDPPAETQPQNPPAQPAPNAWQVIKGVLFRIFIIWAISSWFRRGPAPQDQAGPGGAPRVASRNLFPKDTLMNLHVYISEHEHFTDFNATSALFWEQHDLVYGDWTSGENSDGCYEHFAELDIPQSVQQNGSIYIHVYFTKSGFHPDPRQKALYRRLATVHMSRMINKYKRRRFQKTKNLLTGETEADPEMIKRAEDYGPVEVISHWHPNITINIVDDHTPWVKGSVPPPLDQYVKFDAVSGDYYPIIYFNDYWNLQKDYYPINESLASLPLRVSFCPLSLWRWQLYAAQSTKSPWNFLGDELYEQSDEEQDSVKVALLETNPYLLALTIIVSIVHSVFEFLAFKNDIQFWNSRQSLEGLSVRSVFFGVFQSFVVLLYILDNETNFVVQVSVFIGVLIDLWKITKVMDVRLDREHRVAGIFPRLSFKDKSTYIESSTKVYDDMAFRYLSWILFPLLGCYAVYSLLYLEHKGWYSWVLSMLYGFLLTFGFITMTPQLFINYKLKSVAHLPWRMLTYKALNTFIDDLFAFVIKMPVMYRIGCLRDDVVFFIYLYQRWIYRVDPTRVNEFGMSGEDPTAAAPVAEVPTAAGALTPTPAPTTTTATREEASTSLPTKPTQGASSASEPQEAPPKPAEDKKKD

SEQ ID NO: 3382 - protein, 253 aa, Homo sapiens
MAAAFRKAAKSRQREHRERSEPGFRKHLGLLEKKKDYKLRADDYRKKQEYLKALRKKALEKNPDEFYYKMTRVKLQDGVHIIKETKEEVTPEQLKLMRTQDVKYIEMKRVAEAKKIERLKSELHLLDFQGKQQNKHVFFFDTKKEVEQFDVATHLQTAPELVDRVFNRPRIETLQKEKVKGVTNQTGLKRIAKERQKQYNCLTQRIEREKKLFVIAQKIQTRKDLMDKTQKVKVKKETVNSPAIYKFQSRRKR

SEQ ID NO: 3383 - protein, 447 aa, Homo sapiens [sequence omitted]

SEQ ID NO: 3384 - protein, 689 aa, Homo sapiens
MAVVSAVRWLGLRSRLGQPLTGRRAGLCEQARSCRFYSGSATLSKVEGTDVTGIEEVVIPKKKTWDKVAVLQALASTVNRDTTAVPYVFQDDPYLMPASSLESRSFLLAKKSGENVAKFIINSYPKYFQKDIAEPHIPCLMPEYFEPQIKDISEAALKERIELRKVKASVDMFDQLLQAGTTVSLETTNSLLDLLCYYGDQEPSTDYHFQQTGQSEALEEENDETSRRKAGHQFGVTWRAKNNAERIFSLMPEKNEHSYCTMIRGMVKHRAYEQALNLYTELLNNRLHADVYTFNALIEATVCAINEKFEEKWSKILELLRHMVAQKVKPNLQTFNTILKCLRRFHVFARSPALQVLREMKAIGIEPSLATYHHIIRLFDQPGDPLKRSSFIIYDIMNELMGKRFSPKDPDDDKFFQSAMSICSSLRDLELAYQVHGLLKTGDNWKFIGPDQHRNFYYSKFFDLICLMEQIDVTLKWYEDLIPSAYFPHSQTMIHLLQALDVANRLEVIPKIWKDSKEYGHTFRSDLREEILMLMARDKHPPELQVAFADCAADIKSAYESQPIRQTAQDWPATSLNCIAILFLRAGRTQEAWKMLGLFRKHNKIPRSELLNELMDSAKVSNSPSQAIEVVELASAFSLPICEGLTQRVMSDFAINQEQKEALSNLTALTSDSDTDSSSDSDSDTSEGK

SEQ ID NO: 3385 - protein, 525 aa, Homo sapiens
MAAAPPLRDRLSFLHRLPILLKGTSDDDVPCPGYLFEEIAKISHESPGSSQCLLEYLLSRLHSSSGHGKLKVLKILLYLCSHGSSFFLLILKRNSAFIQEAAAFAGPPDPLHGNSLYQKVRAAAQDLGSTLFSDTVLPLAPSQPLGTPPATGMGSQARPHSTLQGFGYSKEHGRTAVRHQPGQAGGGWDELDSGPSSQNSSQNSDLSRVSDSGSHSGSDSHSGASREPGDLAERVEVVALSDCQQELSLVRTVTRGPRAFLSREEAQHFIKACGLLNCEAVLQLLTCHLRGTSECTQLRALCAIASLGSSDLLPQEHILLRTRPWLQELSMGSPGPVTNKATKILRHFEASCGQLSPARGTSAEPGPTAALPGPSDLLTDAVPLPGSQVFLQPLSSTPVSSRSPAPSSGMPSSPVPTPPPDASPIPAPGDPSEAEARLAESRRWRPERIPGGTDSPKRGPSSCAWSRDSLFAGMELVACPRLVGAGAAAGESCPDAPRAPQTSSQRTAAKEPPGSEPSAFAFLNA

SEQ ID NO: 3386 - protein, 959 aa, Homo sapiens
MAASTGYVRLWGAARCWVLRRPMLAAAGGRVPTAAGAWLLRGQRTCDASPPWALWGRGPAIGGQWRGFWEASSRGGGAFSGGEDASEGGAEEGAGGAGGSAGAGEGPVITALTPMTIPDVFPHLPLIAITRNPVFPRFIKIIEVKNKKLVELLRRKVRLAQPYVGVFLKRDDSNESDVVESLDEIYHTGTFAQIHEMQDLGDKLRMIVMGHRRVHISRQLEVEPEEPEAENKHKPRRKSKRGKKEAEDELSARHPAELAMEPTPELPAEVLMVEVENVVHEDFQVTEEVKALTAEIVKTIRDIIALNPLYRESVLQMMQAGQRVVDNPIYLSDMGAALTGAESHELQDVLEETNIPKRLYKALSLLKKEFELSKLQQRLGREVEEKIKQTHRKYLLQEQLKIIKKELGLEKDDKDAIEEKFRERLKELVVPKHVMDVVDEELSKLGLLDNHSSEFNVTRNYLDWLTSIPWGKYSNENLDLARAQAVLEEDHYGMEDVKKRILEFIAVSQLRGSTQGKILCFYGPPGVGKTSIARSIARALNREYFRFSVGGMTDVAEIKGHRRTYVGAMPGKIIQCLKKTKTENPLILIDEVDKIGRGYQGDPSSALLELLDPEQNANFLDHYLDVPVDLSKVLFICTANVTDTIPEPLRDRMEMINVSGYVAQEKLAIAERYLVPQARALCGLDESKAKLSSDVLTLLIKQYCRESGVRNLQKQVEKVLRKSAYKIVSGEAESVEVTPENLQDFVGKPVFTVERMYDVTPPGVVMGLAWTAMGGSTLFVETSLRRPQDKDAKGDKDGSLEVTGQLGEVMKESARIAYTFARAFLMQHAPANDYLVTSHIHLHVPEGATPKDGPSAGCTIVTALLSLAMGRPVRQNLAMTGEVSLTGKILPVGGIKEKTIAAKRAGVTCIVLPAENKKDFYDLAAFITEGLEVHFVEHYREIFDIAFPDEQAEALAVER

SEQ ID NO: 3387 - protein, 380 aa, Homo sapiens
MCPMLLKNGYNGNATPVTTTAPWASLGLSAKTCNNVSFEESRIVLVVVYSAVCTLGVPANCLTAWLALLQVLQGNVLAVYLLCLALCELLYTGTLPLWVIYIRNQHRWTLGLLACKVTAYIFFCNIYVSILFLCCISCDRFVAVVYALESRGRRRRRTAILISACIFILVGIVHYPVFQTEDKETCFDMLQMDSRIAGYYYARFTVGFAIPLSIIAFTNHRIFRSIKQSMGLSAAQKAKVKHSAIAVVVIFLVCFAPYHLVLLVKAAAFSYYRGDRNAMCGLEERLYTASVVFLCLSTVNGVADPIIYVLATDHSRQEVSRIHKGWKEWSMKTDVTRLTHSRDTEELQSPVALADHYTFSRPVHPPGSPCPAKRLIEESC

SEQ ID NO: 3388 - protein, 1012 aa, Homo sapiens
MDALDASKLLDEELYSRQLYVLGSPAMQRIQGARVLVSGLQGLGAEVAKNLVLMGVGSLTLHDPHPTCWSDLAAQFLLSEQDLERSRAEASQELLAQLNRAVQVVVHTGDITEDLLLDFQVVVLTAAKLEEQLKVGTLCHKHGVCFLAADTRGLVGQLFCDFGEDFTVQDPTEAEPLTAAIQHISQGSPGILTLRKGANTHYFRDGDLVTFSGIEGMVELNDCDPRSIHVREDGSLEIGDTTTFSRYLRGGAITEVKRPKTVRHKSLDTALLQPHVVAQSSQEVHHAHCLHQAFCALHKFQHLHGRPPQPWDPVDAETVVGLARDLEPLKRTEEEPLEEPLDEALVRTVALSSAGVLSPMVAMLGAVAAQEVLKAISRKFMPLDQWLYFDALDCLPEDGELLPSPEDCALRGSRYDGQIAVFGAGFQEKLRRQHYLLVGAGAIGCELLKVFALVGLGAGNSGGLTVVDMDHIERSNLSRQFLFRSQDVGRPKAEVAAAAARGLNPDLQVIPLTYPLDPTTEHIYGDNFFSRVDGVAAALDSFQARRYVAARCTHYLKPLLEAGTSGTWGSATVFMPHVTEAYRAPASAAASEDAPYPVCTVRYFPSTAEHTLQWARHEFEELFRLSAETINHHQQAHTSLADMDEPQTLTLLKPVLGVLRVRPQNWQDCVAWALGHWKLCFHYGIKQLLRHFPPNKVLEDGTPFWSGPKQCPQPLEFDTNQDTHLLYVLAAANLYAQMHGLPGSQDWTALRELLKLLPQPDPQQMAPIFASNLELASASAEFGPEQQKELNKALEVWSVGPPLKPLMFEKDDDSNFHVDFVVAAASLRCQNYGIPPVNRAQSKRIVGQIIPAIATTTAAVAGLLGLELYKVVSGPRPRSAFRHSYLHLAENYLIRYMPFAPAIQTFHHLKWTSWDRLKVPAGQPERTLESLLAHLQEQHGLRVRILLHGSALLYAAGWSPEKQAQHLPLRVTELVQQLTGQAPAPGQRVLVLELSCEGDDEDTAFPPLHYEL

SEQ ID NO: 3389 - protein, 536 aa, Homo sapiens
MALTSFLPAPTQLSQDQLEAEEKARSQRSRQTSLVSSRREPPPYGYRKGWIPRLLEDFGDGGAFPEIHVAQYPLDMGRKKKMSNALAIQVDSEGKIKYDAIARQGQSKDKVIYSKYTDLVPKEVMNADDPDLQRPDEEAIKEITEKTRVALEKSVSQKVAAAMPVRAADKLAPAQYIRYTPSQQGVAFNSGAKQRVIRMVEMQKDPMEPPRFKINKKIPRGPPSPPAPVMHSPSRKMTVKEQQEWKIPPCISNWKNAKGYTIPLDKRLAADGRGLQTVHINENFAKLAEALYIADRKAREAVEMRAQVERKMAQKEKEKHEEKLREMAQKARERRAGIKTHVEKEDGEARERDEIRHDRRKERQHDRNLSRAAPDKRSKLQRNENRDISEVIALGVPNPRTSNEVQYDQRLFNQSKGMDSGFAGGEDEIYNVYDQAWRGGKDMAQSIYRPSKNLDKDMYGDDLEARIKTNRFVPDKEFSGSDRRQRGREGPVQFEEDPFGLDKFLEEAKQHGGSKRPSDSSRPKEHEHEGKKRRKE

SEQ ID NO: 3390 - protein, 160 aa, Homo sapiens
MDKLKKVLSGQDTEDRSGLSEVVEASSLSWSTRIKGFIACFAIGILCSLLGTVLLWVPRKGLHLFAVFYTFGNIASIGSTIFLMGPVKQLKRMFEPTRLIATIMVLLCFALTLCSAFWWHNKGLALIFCILQSLALTWYSLSFIPFARDAVKKCFAVCLA

SEQ ID NO: 3391 - protein, 682 aa, Homo sapiens
MTCPPTGLYGPEGILPARRTLRPQGKGRWQQLWETPTLLWEAPRLGLDTAQGLELLSLLGALVALGALLLSPLRHPVIYLLLWAAYLSACQVGQVFLYFQWDSLLLETGFLAVLVAPLRPASHRKEAPQGRQAGALPHEDLPFWLVRWLLFRLMFASGVVKLTSRCPAWWGLTALTYHYETQCLPTPAAWFAHHLPVWLHKLSVVATFLIEIAVPPLFFAPIRRLRLAAFYSQVLLQVLIIITGNYNFFNLMTLVLTTALLDDQHLAAEPGHGSRKKTATSWPKALLATLSLLLELAVYGLLAYGTVHYFGLEVDWQQRTIHSRTTFTFHQFSQWLKTLTLPTVWLGVASLVWELLSALWRWTQVRGWLRKLSAVVQLSLVGTATVALFLISLVPYSYVEPGTHGRLWTGAHRLFGAVEHLQLANSYGLFRRMTGLGGRPEVVLEGSYDGHHWTEIEFMYKPGNLSRPPPVVVPHQPRLDWQMWFAALGPHTHSPWFTSLVLRLLQGKEPVIRLVQSQVARYPFHKQPPTYVRAQRYKYWFSQPGEQGQWWRRQWVEEFFPSVSLGDPTLETLLRQFGLQEKSPPRTRSANSTLAQALHWTRSQLSPLEAPALLWGLLMAVGAVRFVQALLAPCSLRSSPLAPVSGEKRRPASQKDSGAASEQATAAPNPCSSSSRTTRRKK

SEQ ID NO: 3392 - protein, 732 aa, Homo sapiens
MVRSGNKAAVVLCMDVGFTMSNSIPGIESPFEQAKKVITMFVQRQVFAENKDEIALVLFGTDGTDNPLSGGDQYQNITVHRHLMLPDFDLLEDIESKIQPGSQQADFLDALIVSMDVIQHETIGKKFEKRHIEIFTDLSSRFSKSQLDIIIHSLKKCDISLQFFLPFSLGKEDGSGDRGDGPFRLGGHGPSFPLKGITEQQKEGLEIVKMVMISLEGEDGLDEIYSFSESLRKLCVFKKIERHSIHWPCRLTIGSNLSIRIAAYKSILQERVKKTWTVVDAKTLKKEDIQKETVYCLNDDDETEVLKEDIIQGFRYGSDIVPFSKVDEEQMKYKSEGKCFSVLGFCKSSQVQRRFFMGNQVLKVFAARDDEAAAVALSSLIHALDDLDMVAIVRYAYDKRANPQVGVAFPHIKHNYECLVYVQLPFMEDLRQYMFSSLKNSKKYAPTEAQLNAVDALIDSMSLAKKDEKTDTLEDLFPTTKIPNPRFQRLFQCLLHRALHPREPLPPIQQHIWNMLNPPAEVTTKSQIPLSKIKTLFPLIEAKKKDQVTAQEIFQDNHEDGPTAKKLKTEQGGAHFSVSSLAEGSVTSVGSVNPAENFRVLVKQKKASFEEASNQLINHIEQFLDTNETPYFMKSIDCIRAFREEAIKFSEEQRFNNFLKALQEKVEIKQLNHFWEIVVQDGITLITKEEASGSSVTAEEAKKFLAPKDKPSGDTAAVFEEGGDVDDLLDMI

SEQ ID NO: 3393 - protein, 620 aa, Homo sapiens
MALGEEKAEAEASEDTKAQSYGRGSCRERELDIPGPMSGEQPPRLEAEGGLISPVWGAEGIPAPTCWIGTDPGSPSRAHQPQASDANREPVAERSEPALSGLPPATMGSGDLLLSGESQVEKTKLSSSEEFPQTLSLPRTTTICSGHDADTEDDPSLADLPQALDLSQQPHSSGLSCLSQWKSVLSPGSAAQPSSCSISASSTGSSLQGHQERAEPRGGSLAKVSSSLEPVVPQEPSSVVGLGPRPQWSPQPVFSGGDASGLGRRRLSFQAEYWACVLPDSLPPSPDRHSPLWNPNKEYEDLLDYTYPLRPGPQLPKHLDSRVPADPVLQDSGVDLDSFSVSPASTLKSPTNVSPNCPPAEATALPFSGPREPSLKQWPSRVPQKQGGMGLASWSQLASTPRAPGSRDARWERREPALRGAKDRLTIGKHLDMGSPQLRTRDRGWPSPRPEREKRTSQSARRPTCTESRWKSEEEVESDDEYLALPARLTQTFCCQLEELICWLYNVADVTDHGTAARSNLTSLKSSLQLYRQFKKDIDEHQSLTESVLQKGEILLQCLLENTPVLEDVLGRIAKQSGELESHADRLYDSILASLDMLAGCTLIPDKKPMAAMEHPCEGV

SEQ ID NO: 3394 - protein, 449 aa, Homo sapiens
MMLSTEGREGFVVKVRGLPWSCSADEVMRFFSDCKIQNGTSGIRFIYTREGRPSGEAFVELESEEEVKLALKKDRETMGHRYVEVFKSNSVEMDWVLKHTGPNSPDTANDGFVRLRGLPFGCSKEEIVQFFSGLEIVPNGMTLPVDFQGRSTGEAFVQFASQEIAEKALKKHKERIGHRYIEIFKSSRAEVRTHYDPPRKLMAMQRPGPYDRPGAGRGYNSIGRGAGFERMRRGAYGGGYGGYDDYGGYNDGYGFGSDRFGRDLNYCFSGMSDHRYGDGGSSFQSTTGHCVHMRGLPYRATENDIYNFFSPLNPMRVHIEIGPDGRVTGEADVEFATHEDAVAAMAKDKANMQHRYVELFLNSTAGTSGGAYDHSYVELFLNSTAGASGGAYGSQMMGGMGLSNQSSYGGPASQQLSGGYGGGYGGQSSMSGYDQVLQENSSDYQSNLA

SEQ ID NO: 3395 - protein, 449 aa, Homo sapiens; identical to SEQ ID NO: 3394

SEQ ID NO: 3396 - protein, 125 aa, Homo sapiens
MAMQAAKRANIRLPPEVNRILYIRNLPYKITAEEMYDIFGKYGPIRQIRVGNTPETRGTAYVVYEDIFDAKNACDHLSGFNVCNRYLVVLYYNANRAFQKMDTKKKEEQLKLLKEKYGINTDPPK

SEQ ID NO: 3397 - protein, 267 aa, Homo sapiens
MRVAALISGGKDSCYNMMQCIAAGHQIVALANLRPAENQVGSDELDSYMYQTVGHHAIDLYAEAMALPLYRRTIRGRSLDTRQVYTKCEGDEVEDLYELLKLVKEKEEVEGISVGAILSDYQRIRVENVCKRLNLQPLAYLWQRNQEDLLREMISSNIQAMIIKVAALGLDPDKHLGKTLDQMEPYLIELSKKYGVHVCGEGGEYETFTLDCPLFKKKIIVDSSEVVIHSADAFAPVAYLRFLELHLEDKVSSVPDNYRTSNYIYNF

SEQ ID NO: 3398 - protein, 89 aa, Homo sapiens
MTTSQKHRDFVAEPMGEKPVGSLAGIGEVLGKKLEERGFDKAYVVLGQFLVLKKDEDLFREWLKDTCGANAKQSRDCFGCLREWCDAFL

SEQ ID NO: 3399 - protein, 913 aa, Homo sapiens
MGDSRDLCPHLDSIGEVTKEDLLLKSKGTCQSCGVTGPNLWACLQVACPYVGCGESFADHSTIHAQAKKHNLTVNLTTFRLWCYACEKEVFLEQRLAAPLLGSSSKFSEQDSPPPSHPLKAVPIAVADEGESESEDDDLKPRGLTGMKNLGNSCYMNAALQALSNCPPLTQFFLECGGLVRTDKKPALCKSYQKLVSEVWHKKRPSYVVPTSLSHGIKLVNPMFRGYAQQDTQEFLRCLMDQLHEELKEPVVATVALTEARDSDSSDTDEKREGDRSPSEDEFLSCDSSSDRGEGDGQGRGGGSSQAETELLIPDEAGRAISEKERMKDRKFSWGQQRTNSEQVDEDADVDTAMAALDQPAEAQPPSPRSSSPCRTPEPDNDAHLRSSSRPCSPVHHHEGHAKLSSSPPRASPVRMAPSYVLKKAQVLSAGSRRRKEQRYRSVISDIFDGSILSLVQCLTCDRVSTTVETFQDLSLPIPGKEDLAKLHSAIYQNVPAKPGACGDSYAAQGWLAFIVEYIRRFVVSCTPSWFWGPVVTLEDCLAAFFAADELKGDNMYSCERCKKLRNGVKYCKVLRLPEILCIHLKRFRHEVMYSFKINSHVSFPLEGLDLRPFLAKECTSQITTYDLLSVICHHGTAGSGHYIAYCQNVINGQWYEFDDQYVTEVHETVVQNAEGYVLFYRKSSEEAMRERQQVVSLAAMREPSLLRFYVSREWLNKFNTFAEPGPITNQTFLCSHGGIPPHKYHYIDDLVVILPQNVWEHLYNRFGGGPAVNHLYVCSICQVEIEALAKRRRIEIDTFIKLNKAFQAEESPGVIYCISMQWFREWEAFVKGKDNEPPGPIDNSRIAQVKGSGHVQLKQGADYGQISEETWTYLNSLYGGGPEIAIRQSVAQPLGPENLHGEQKIEAETRAV

SEQ ID NO: 3400 - protein, 913 aa, Homo sapiens; identical to SEQ ID NO: 3399

SEQ ID NO: 3401 - protein, 435 aa, Homo sapiens
MEMEKEFEQIDKSGSWAAIYQDIRHEASDFPCRVAKLPKNKNRNRYRDVSPFDHSRIKLHQEDNDYINASLIKMEEAQRSYILTQGPLPNTCGHFWEMVWEQKSRGVVMLNRVMEKGSLKCAQYWPQKEEKEMIFEDTNLKLTLISEDIKSYYTVRQLELENLTTQETREILHFHYTTWPDFGVPESPASFLNFLFKVRESGSLSPEHGPVVVHCSAGIGRSGTFCLADTCLLLMDKRKDPSSVDIKKVLLEMRKFRMGLIQTADQLRFSYLAVIEGAKFIMGDSSVQDQWKELSHEDLEPPPEHIPPPPRPPKRILEPHNGKCREFFPNHQWVKEETQEDKDCPIKEEKGSPLNAAPYGIESMSQDTEVRSRVVGGSLRGAQAASPAKGEPSLPEKDEDHALSYWKPFLVNMCVATVLTAGAYLCYRFLFNSNT

SEQ ID NO: 3402 - protein, 473 aa, Homo sapiens
MPKLQGFEFWSRTLRGARHVVAPMVDQSELAWRLLSRRHGAQLCYTPMLHAQVFVRDANYRKENLYCEVCPEDRPLIVQFCANDPEVFVQAALLAQDYCDAIDLNLGCPQMIAKRGHYGAFLQDEWDLLQRMILLAHEKLSVPVTCKIRVFPEIDKTVRYAQMLEKAGCQLLTVHGRTKEQKGPLSGAASWEHIKAVRKAVAIPVFANGNIQCLQDVERCLRDTGVQGVMSAEGNLHNPALFEGRSPAVWELAEEYLDIVREHPCPLSYVRAHLFKLWHHTLQVHQELREELAKVKTLEGIAAVSQELKLRCQEEISRQEGAKPTGDLPFHWICQPYIRPGPREGSKEKAGARSKRALEEEEGGTEVLSKNKQKKQLRNPHKTFDPSLKPKYAKCDQCGNPKGNRCVFSLCRGCCKKRASKETADCPGHGLLFKTKLEKSLAWKEAQPELQEPQPAAPGTPGGFSEVMGSALA

SEQ ID NO: 3403 - protein, 111 aa, Homo sapiens
MAGKQAVSASGKWLDGIRKWYYNAAGFNKLGLMRDDTIYEDEDVKEAIRRLPENLYNDRMFRIKRALDLNLKHQILPKEQWTKYEEENFYLEPYLKEVIRERKEREEWAKK

SEQ ID NO: 3404 - protein, 198 aa, Homo sapiens
MSTVDLARVGACILKHAVTGEAVELRSLWREHACVVAGLRRFGCVVCRWIAQDLSSLAGLLDQHGVRLVGVGPEALGLQEFLDGDYFAGELYLDESKQLYKELGFKRYNSLSILPAALGKPVRDVAAKAKAVGIQGNLSGDLLQSGGLLVVSKGGDKVLLHFVQKSPGDYVPKEHILQVLGISAEVCASDPPQCDREV

SEQ ID NO: 3405 - protein, 240 aa, Homo sapiens
MAGPPRLLLLPLLLALARGLPGALAAQEVQQSPHCTTVPVGASVNITCSTSGGLRGIYLRQLGPQPQDIIYYEDGVVPTTDRRFRGRIDFSGSQDNLTITMHRLQLSDTGTYTCQAITEVNVYGSGTLVLVTEEQSQGWHRCSDAPPRASALPAPPTGSALPDPQTASALPDPPAASALPAALAVISFLLGLGLGVACVLARTQIKKLCSWRDKNSAACVVYEDMSHSRCNTLSSPNQYQ

SEQ ID NO: 3406 - protein, 458 aa, Homo sapiens
MMLIPMASVMAVTEPKWVSVWSRFLWVTLLSMVLGSLLALLLPLGAVEEQCLAVLKGLYLLRSKPDRAQHAATKCTSPSTELSITSRGATLLVAKTKASPAGKLEARAALNQALEMKRQGKREKAQKLFMHALKMDPDFVDALTEFGIFSEEDKDIIQADYLYTRALTISPYHEKALVNRDRTLPLVEEIDQRYFSIIDSKVKKVMSIPKGNSALRRVMEETYYHHIYHTVAIEGNTLTLSEIRHILETRYAVPGKSLEEQNEVIGMHAAMKYINTTLVSRIGSVTISDVLEIHRRVLGYVDPVEAGRFRTTQVLVGHHIPPHPQDVEKQMQEFVQWLNSEEAMNLHPVEFAALAHYKLVYIHPFIDGNGRTSRLLMNLILMQAGYPPITIRKEQRSDYYHVLEAANEGDVRPFIRFIAKCTETTLDTLLFATTEYSVALPEAQPNHSGFKETLPVKP

SEQ ID NO: 3407 - protein, 784 aa, Homo sapiens
MEGAMAVRVTAAHTAEAQAEAGREAGEGAVAAVAAALAPSGFLGLPAPFSEEDEDDVHRCGRCQAEFTALEDFVQHKIQKACQRAPPEALPATPATTALLGQEVVPAAPGPEEPITVAHIVVEAASLAADISHASDLVGGGHIKEVIVAAEAELGDGEMAEAPGSPRQQGLGLAGEGEQAQVKLLVNKDGRYVCALCHKTFKTGSILKAHMVTHSSRKDHECKLCGASFRTKGSLIRHHRRHTDERPYKCSKCGKSFRESGALTRHLKSLTPCTEKIRFSVSKDVVVSKEDARAGSGAGAAGLGTATSSVTGEPIETSPVIHLVTDAKGTVIHEVHVQMQELSLGMKALAPEPPVSQELPCSSEGSRENLLHQAMQNSGIVLERAAGEEGALEPAPAAGSSPQPLAVAAPQLPVLEVQPLETQVASEASAVPRTHPCPQCSETFPTAATLEAHKRGHTGPRPFACAQCGKAFPKAYLLKKHQEVHVRERRFRCGDCGKLYKTIAHVRGHRRVHSDERPYPCPKCGKRYKTKNAQQVHFRTHLEEKPHVCQFCSRGFREKGSLVRHVRHHTGEKPFKCYKCGRGFAEHGTLNRHLRTKGGCLLEVEELLVSEDSPAAATTVLTEDPHTVLVEFSSVVADTQEYIIEATADDAETSEATEIIEGTQTEVDSHIMKVVQQIVHQASAGHQIIVQNVTMDEETALGPEAAAADTITIATPESLTEQVAMTLASAISEGTVLAARAGTSGTEQATVTMVSSEDIEILEHAGELVIASPEGQLEVQTVIV

SEQ ID NO: 3408 - protein, 193 aa, Homo sapiens
MRGKATEAGKNSTQSLVEGLALAWKYLKFTQSSGKKNGGKEELRGETSGIPANLKTGRGIGSNLFGYRLEPTKGPQRRPHRKSRLCRGPARIEALAGVPMYRNEFTAWYRRMSVVYGIGTWSVLGSLLYYSRTMAKSSDQKDGSASEVPSELSERPKGFYVETVVTYKEDFVPNTEKILNYWKSWTGGPGTEP

SEQ ID NO: 3409 - protein, 193 aa, Homo sapiens; identical to SEQ ID NO: 3408

SEQ ID NO: 3410 - protein, 398 aa, Homo sapiens
MVTLITEKLQSQSLDDLTCKAEAGPLQYSAETLNKSGRLFPLELNDQSPWKVFSGGPPVRSQAATGPDFSFLPGLSAAAHTMGLQWQPQSPRPGAGLGAASTVDPSESTGSSTAPPTKRHCRSLSEPEELVRCRSPWRPGSSKVWTPVSKRRCDSGGSATRQGSPGAVLPRSAVWSTGPTSPATPRPSSASGGFVDSSEGSAGSGPLWCSAESCLPSTRRRPSLSQERLAGAGTPLPWASSSPTSTPALGGRRGLLRCRSQPCVLSGKRSRRKRRREEDARWTRPSLDFLKMTQTLKNSKSLCSLNYEDDDEDDTPVKTVLSSPCDSRGLPGITMPGCSQRGLRTSPVHPNLWASRESVTSDGSRRSSGDPRDGDSVGEEGVFPRARWELDLEQIENN

SEQ ID NO: 3411 - protein, 488 aa, Homo sapiens
MADFKVLSSQDIKWALHELKGHYAITRKALSDAIKKWQELSPETSGKRKKRKQMNQYSYIDFKFEQGDIKIEKRMFFLENKRRHCRSYDRRALLPAVQQEQEFYEQKIKEMAEHEDFLLALQMNEEQYQKDGQLIECRCCYGEFPFEELTQCADAHLFCKECLIRYAQEAVFGSGKLELSCMEGSCTCSFPTSELEKVLPQTILYKYYERKAEEEVAAAYADELVRCPSCSFPALLDSDVKRFSCPNPHCRKETCRKCQGLWKEHNGLTCEELAEKDDIKYRTSIEEKMTAARIRKCHKCGTGLIKSEGCNRMSCRCGAQMCYLCRVSINGYDHFCQHPRSPGAPCQECSRCSLWTDPTEDDEKLIEEIQKEAEEEQKRKNGENTFKRIGPPLEKPVEKVQRVEALPRPVPQNLPQPQMPPYAFAHPPFPLPPVRPVFNNFPLNMGPIPAPYVPPLPNVRVNYDFGPIHMPLEHNLPMHFGPQPRHRF

SEQ ID NO: 3412 - protein, 923 aa, Homo sapiens
MEEGNNNEEVIHLNNFHCHRGQEWINLRDGPITISDSSDEERIPMLVTPAPQQHEEEDLDDDVILTETNKPQRSRPNLIKPAAQWQDLKRLGEERPKKSRAAFESDKSSYFSVCNNPLFDSGAQDDSEDDYGEFLDLGPPGISEFTKPSGQTEREPKPGPSHNQAANDIVNPRSEQKVIILEEGSLLYTESDPLETQNQSSEDSETELLSNLGESAALADDQAIEEDCWLDHPYFQSLNQQPREITNQVVPQERQPEAELGRLLFQHEFPGPAFPRPEPQQGGISGPSSPQPAHPLGEFEDQQLASDDEEPGPAFPMQESQEPNLENIWGQEAAEVDQELVELLVKETEARFPDVANGFIEEIIHFKNYYDLNVLCNFLLENPDYPKREDRIIINPSSSLLASQDETKLPKIDFFDYSKLTPLDQRCFIQAADLLMADFKVLSSQDIKWALHELKGHYAITRKALSDAIKKWQELSPETSGKRKKRKQMNQYSYIDFKFEQGDIKIEKRMFFLENKRRHCRSYDRRALLPAVQQEQEFYEQKIKEMAEHEDFLLALQMNEEQYQKDGQLIECRCCYGEFPFEELTQCADAHLFCKECLIRYAQEAVFGSGKLELSCMEGSCTCSFPTSELEKVLPQTILYKYYERKAEEEVAAAYADELVRCPSCSFPALLDSDVKRFSCPNPHCRKETCRKCQGLWKEHNGLTCEELAEKDDIKYRTSIEEKMTAARIRKCHKCGTGLIKSEGCNRMSCRCGAQMCYLCRVSINGYDHFCQHPRSPGAPCQECSRCSLWTDPTEDDEKLIEEIQKEAEEEQKRKNGENTFKRIGPPLEKPVEKVQRVEALPRPVPQNLPQPQMPPYAFAHPPFPLPPVRPVFNNFPLNMGPIPAPYVPPLPNVRVNYDFGPIHMPLEHNLPMHFGPQPRHRF

SEQ ID NO: 3413 - protein, 866 aa, Homo sapiens
MEEGNNNEEVIHLNNFHCHRGQEWINLRDGPITISDSSDEERIPMLVTPAPQQHEEEDLDDDVILTEDDSEDDYGEFLDLGPPGISEFTKPSGQTEREPKPGPSHNQAANDIVNPRSEQKVIILEEGSLLYTESDPLETQNQSSEDSETELLSNLGESAALADDQAIEEDCWLDHPYFQSLNQQPREITNQVVPQERQPEAELGRLLFQHEFPGPAFPRPEPQQGGISGPSSPQPAHPLGEFEDQQLASDDEEPGPAFPMQESQEPNLENIWGQEAAEVDQELVELLVKETEARFPDVANGFIEEIIHFKNYYDLNVLCNFLLENPDYPKREDRIIINPSSSLLASQDETKLPKIDFFDYSKLTPLDQRCFIQAADLLMADFKVLSSQDIKWALHELKGHYAITRKALSDAIKKWQELSPETSGKRKKRKQMNQYSYIDFKFEQGDIKIEKRMFFLENKRRHCRSYDRRALLPAVQQEQEFYEQKIKEMAEHEDFLLALQMNEEQYQKDGQLIECRCCYGEFPFEELTQCADAHLFCKECLIRYAQEAVFGSGKLELSCMEGSCTCSFPTSELEKVLPQTILYKYYERKAEEEVAAAYADELVRCPSCSFPALLDSDVKRFSCPNPHCRKETCRKCQGLWKEHNGLTCEELAEKDDIKYRTSIEEKMTAARIRKCHKCGTGLIKSEGCNRMSCRCGAQMCYLCRVSINGYDHFCQHPRSPGAPCQECSRCSLWTDPTEDDEKLIEEIQKEAEEEQKRKNGENTFKRIGPPLEKPVEKVQRVEALPRPVPQNLPQPQMPPYAFAHPPFPLPPVRPVFNNFPLNMGPIPAPYVPPLPNVRVNYDFGPIHMPLEHNLPMHFGPQPRHRF

SEQ ID NO: 3414 - protein, 341 aa, Homo sapiens
MERAVPLAVPLGQTEVFQALQRLHMTIFSQSVSPCGKFLAAGNNYGQIAIFSLSSALSSEAKEESKKPVVTFQAHDGPVYSMVSTDRHLLSAGDGEVKAWLWAEMLKKGCKELWRRQPPYRTSLEVPEINALLLVPKENSLILAGGDCQLHTMDLETGTFTRVLRGHTDYIHCLALRERSPEVLSGGEDGAVRLWDLRTAKEVQTIEVYKHEECSRPHNGRWIGCLATDSDWMVCGGGPALTLWHLRSSTPTTIFPIRAPQKHVTFYQDLILSAGQGRCVNQWQLSGELKAQVPGSSPGLLSLSLNQQPAAPECKVLTAAGNSCRVDVFTNLGYRAFSLSF

SEQ ID NO: 3415 - protein, 670 aa, Homo sapiens
MAETKIIYHMDEEETPYLVKLPVAPERVTLADFKNVLSNRPVHAYKFFFKSMDQDFGVVKEEIFDDNAKLPCFNGRVVSWLVLAEGAHSDAGSQGTDSHTDLPPPLERTGGIGDSRPPSFHPNVASSRDGMDNETGTESMVSHRRERARRRNREEAARTNGHPRGDRRRDVGLPPDSASTALSSELESSSFVDSDEDGSTSRLSSSTEQSTSSRLIRKHKRRRRKQRLRQADRASSFSSITDSTMSLNIVTVTLNMERHHFLGISIVGQSNDRGDGGIYIGSIMKGGAVAADGRIEPGDMLLQVNDVNFENMSNDDAVRVLREIVSQTGPISLTVAKCWDPTPRSYFTVPRADPVRPIDPAAWLSHTAALTGALPRYELEEAPLTVKSDMSAVVRVMQLPDSGLEIRDRMWLKITIANAVIGADVVDWLYTHVEGFKERREARKYASSLLKHGFLRHTVNKITFSEQCYYVFGDLCSNLATLNLNSGSSGTSDQDTLAPLPHPAAPWPLGQGYPYQYPGPPPCFPPAYQDPGFSYGSGSTGSQQSEGSKSSGSTRSSRRAPGREKERRAAGAGGSGSESDHTAPSGVGSSWRERPAGQLSRGSSPRSQASATAPGLPPPHPTTKAYTVVGGPPGGPPVRELAAVPPELTGSRQSFQKAMGNPCEFFVDIM

SEQ ID NO: 3416 - protein, 353 aa, Homo sapiens
MGALLCDHRSCRPISLTVAKCWDPTPRSYFTVPRADPVRPIDPAAWLSHTAALTGALPRYELEEAPLTVKSDMSAVVRVMQLPDSGLEIRDRMWLKITIANAVIGADVVDWLYTHVEGFKERREARKYASSLLKHGFLRHTVNKITFSEQCYYVFGDLCSNLATLNLNSGSSGTSDQDTLAPLPHPAAPWPLGQGYPYQYPGPPPCFPPAYQDPGFSYGSGSTGSQQSEGSKSSGSTRSSRRAPGREKERRAAGAGGSGSESDHTAPSGVGSSWRERPAGQLSRGSSPRSQASATAPGLPPPHPTTKAYTVVGGPPGGPPVRELAAVPPELTGSRQSFQKAMGNPCEFFVDIM

SEQ ID NO: 3417 - protein, 444 aa, Homo sapiens
MAETKIIYHMDEEETPYLVKLPVAPERVTLADFKNVLSNRPVHAYKFFFKSMDQDFGVVKEEIFDDNAKLPCFNGRVVSWLVLAEGAHSDAGSQGTDSHTDLPPPLERTGGIGDSRPPSFHPNVASSRDGMDNETGTESMVSHRRERARRRNREEAARTNGHPRGDRRRDVGLPPDSASTALSSELESSSFVDSDEDGSTSRLSSSTEQSTSSRLTRKYASSLLKHGFLRHTVNKITFSEQCYYVFGDLCSNLATLNLNSGSSGTSDQDTLAPLPHPAAPWPLGQGYPYQYPGPPPCFPPAYQDPGFSYGSGSTGSQQSEGSKSSGSTRSSRRAPGREKERRAAGAGGSGSESDHTAPSGVGSSWRERPAGQLSRGSSPRSQASATAPGLPPPHPTTKAYTVVGGPPGGPPVRELAAVPPELTGSRQSFQKAMGNPCEFFVDIM

SEQ ID NO: 3418 - protein, 230 aa, Homo sapiens
MRLAGPLRIVVLVVSVGVTWIVVSILLGGPGSGFPRIQQLFTSPESSVTAAPRARKYKCGLPQPCPEEHLAFRVVSGAANVIGPKICLEDKMLMSSVKDNVGRGLNIALVNGVSGELIEARAFDMWAGDVNDLLKFIRPLHEGTLVFVASYDDPATKMNEETRKLFSELGSRNAKELAFRDSWVFVGAKGVQNKSPFEQHVKNSKHSNKYEGCPEALEMEGCIPRRSTAS

SEQ ID NO: 3419 - protein, 513 aa, Homo sapiens
MASVLSRRLGKRSLLGARVLGPSASEGPSAAPPSEPLLEGAAPQPFTTSDDTPCQEQPKEVLKAPSTSGLQQVAFQPGQKVYVWYGGQECTGLVEQHSWMEGQVTVWLLEQKLQVCCRVEEVWLAELQGPCPQAPPLEPGAQALAYRPVSRNIDVPKRKSDAVEMDEMMAAMVLTSLSCSPVVQSPPGTEANFSASRAACDPWKESGDISDSGSSTTSGHWSGSSGVSTPSPPHPQASPKYLGDAFGSPQTDHGFETDPDPFLLDEPAPRKRKNSVKVMYKCLWPNCGKVLRSIVGIKRHVKALHLGDTVDSDQFKREEDFYYTEVQLKEESAAAAAAAAAGTPVPGTPTSEPAPTPSMTGLPLSALPPPLHKAQSSGPEHPGPESSLPSGALSKSAPGSFWHIQADHAYQALPSFQIPVSPHIYTSVSWAAAPSAACSLSPVRSRSLSFSEPQQPAPAMKSHLIVTSPPRAQSGARKARGEAKKCRKVYGIEHRDQWCTACRWKKACQRFLD

SEQ ID NO: 3420 - protein, 606 aa, Homo sapiens
MPSSVTALGQARSSGPGMAPSACCCSPAALQRRLPILAWLPSYSLQWLKMDFVAGLSVGLTAIPQALAYAEVAGLPPQYGLYSAFMGCFVYFFLGTSRDVTLGPTAIMSLLVSFYTFHEPAYAVLLAFLSGCIQLAMGVLRLGFLLDFISYPVIKGFTSAAAVTIGFGQIKNLLGLQNIPRPFFLQVYHTFLRIAETRVGDAVLGLVCMLLLLVLKLMRDHVPPVHPEMPPGVRLSRGLVWAATTARNALVVSFAALVAYSFEVTGYQPFILTGETAEGLPPVRIPPFSVTTANGTISFTEMVQDMGAGLAVVPLMGLLESIAVAKAFASQNNYRIDANQELLAIGLTNMLGSLVSSYPVTGSFGRTAVNAQSGVCTPAGGLVTGVLVLLSLDYLTSLFYYIPKSALAAVIIMAVAPLFDTKIFRTLWRVKRLDLLPLCVTFLLCFWEVQYGILAGALVSLLMLLHSAARPETKVSEGPVLVLQPASGLSFPAMEALREEILSRALEVSPPRCLVLECTHVCSIDYTVVLGLGELLQDFQKQGVALAFVGLQVPVLRVLLSADLKGFQYFSTLEEAEKRLRQEPGTQPYNIREDSILDQKVALLKA

SEQ ID NO: 3421 - protein, 72 aa, Homo sapiens
MSAIFNFQSLLTVILLLICTCAYIRSLAPSLLDRNKTGLLGIFWKCARIGERKSPYVAVCCIVMAFSILFIQ

SEQ ID NO: 3422 - protein, 546 aa, Homo sapiens [sequence omitted]

SEQ ID NO: 3423 - protein, 775 aa, Homo sapiens
MLQGLLPVSLLLSVAVSAIKELPGVKKYEVVYPIRLHPLHKREAKEPEQQEQFETELKYKMTINGKIAVLYLKKNKNLLAPGYTETYYNSTGKEITTSPQIMDDCYYQGHILNEKVSDASISTCRGLRGYFSQGDQRYFIEPLSPIHRDGQEHALFKYNPDEKNYDSTCGMDGVLWAHDLQQNIALPATKLVKLKDRKVQEHEKYIEYYLVLDNGEFKRYNENQDEIRKRVFEMANYVNMLYKKLNTHVALVGMEIWTDKDKIKITPNASFTLENFSKWRGSVLSRRKRHDIAQLITATELAGTTVGLAFMSTMCSPYSVGVVQDHSDNLLRVAGTMAHEMGHNFGMFHDDYSCKCPSTICVMDKALSFYIPTDFSSCSRLSYDKFFEDKLSNCLFNAPLPTDIISTPICGNQLVEMGEDCDCGTSEECTNICCDAKTCKIKATFQCALGECCEKCQFKKAGMVCRPAKDECDLPEMCNGKSGNCPDDRFQVNGFPCHHGKGHCLMGTCPTLQEQCTELWGPGTEVADKSCYNRNEGGSKYGYCRRVDDTLIPCKANDTMCGKLFCQGGSDNLPWKGRIVTFLTCKTFDPEDTSQEIGMVANGTKCGDNKVCINAECVDIEKAYKSTNCSSKCKGHAVCDHELQCQCEEGWIPPDCDDSSVVFHFSIVVGVLFPMAVIFVVVAMVIRHQSSREKQKKDQRPLSTTGTRPHKQKRKPQMVKAVQPQEMSQMKPHVYDLPVEGNEPPASFHKDTNALPPTVFKDNPMSTPKDSNPKA

SEQ ID NO: 3424 - protein, 540 aa, Homo sapiens
MLQGLLPVSLLLSVAVSAIKELPGVKKYEVVYPIRLHPLHKREAKEPEQQEQFETELKYKMTINGKIAVLYLKKNKNLLAPGYTETYYNSTGKEITTSPQIMDDCYYQGHILNEKVSDASISTCRGLRGYFSQGDQRYFIEPLSPIHRDGQEHALFKYNPDEKNYDSTCGMDGVLWAHDLQQNIALPATKLVKLKDRKVQEHEKYIEYYLVLDNGEFKRYNENQDEIRKRVFEMANYVNMLYKKLNTHVALVGMEIWTDKDKIKITPNASFTLENFSKWRGSVLSRRKRHDIAQLITATELAGTTVGLAFMSTMCSPYSVGVVQDHSDNLLRVAGTMAHEMGHNFGMFHDDYSCKCPSTICVMDKALSFYIPTDFSSCSRLSYDKFFEDKLSNCLFNAPLPTDIISTPICGNQLVEMGEDCDCGTSEECTNICCDAKTCKIKATFQCALGECCEKCQFKKAGMVCRPAKDECDLPEMCNGKSGNCPDDRFQVNGFPCHHGKGHCLMGTCPTLQEQCTELWGPGRRTNPFPCACAKENHFR

SEQ ID NO: 3425 - protein, 147 aa, Homo sapiens
MSQTRDLQGGKAFGLLKAQQEERLDEINKQFLDDPKYSSDEDLPSKLEGFKEKYMEFDLNGNGDIDIMSLKRMLEKLGVPKTHLELKKLIGEVSSGSGETFSYPDFLRMMLGKRSAILKMILMYEEKAREKEKPTGPPAKKAISELP

SEQ ID NO: 3426 - protein, 132 aa, Homo sapiens
MEFDLNGNGDIGEKRVICGGRVVCRPKKTEVSPTCSIPHDLGGGPPTTVGGRRMGMRKWERRERVSPPSPHPHPLPPDIMSLKRMLEKLGVPKTHLELKKLIGEVSSGSGETFSYPDFLRMMLGKRSAILKM

SEQ ID NO: 3427 - protein, 93 aa, Homo sapiens
MEFDLNGNGDIDIMSLKRMLEKLGVPKTHLELKKLIGEVSSGSGETFSYPDFLRMMLGKRSAILKMILMYEEKAREKEKPTGPPAKKAISELP

SEQ ID NO: 3428 - protein, 265 aa, Homo sapiens
MATLLRPVLRRLCGLPGLQRPAAEMPLRARSDGAGPLYSHHLPTSPLQKALLAAGSAAMALYNPYRHDMVAVLGETTGHRTLKVLRDQMRRDPEGAQILQERPRISTSTLDLGKLQSLPEGSLGREYLRFLDVNRVSPDTRAPTRFVDDEELAYVIQRYREVHDMLHTLLGMPTNILGEIVVKWFEAVQTGLPMCILGAFFGPIRLGAQSLQVLVSELIPWAVQNGRRAHCVLNLYYERRWEQSLRALREELGITAPPMHVQGLA

SEQ ID NO: 3429 - protein, 344 aa, Homo sapiens
MDSYSAPESTPSASSRPEDYFIGATPLQKRLESVRKQSSFILTPPRRKIPQCSQLQEDVDPQKVAFLLHKQWTLYSLTPLYKFSYSNLKEYSRLLNAFIVAEKQKGLAVEVGEDFNIKVIFSTLLGMKGTQRDPEAFLVQIVSKSQLPSENREGKVLWTGWFCCVFGDSLLETVSEDFTCLPLFLANGAESNTAIIGTWFQKTFDCYFSPLAINAFNLSWMAAMWTACKMDHYVATTEFLWSVPCSPQSLDISFAIHPEDAKALWDSVHKTPGEVTQEEVDLFMDCLYSHFHRHFKIHLSATRLVRVSTSVASAHTDGKIKILCHKYLIGVLAYLTELAIFQIE

SEQ ID NO: 3430 - protein, 707 aa, Homo sapiens
MAAAVAAAGRLGWLFAALCLGNAAGEAAPGPRVLGFCLEEDGAAGAGWVRGGAARDTPDATFLLRLFGPGFANSSWSWVAPEGAGCREEAASPAGEWRALLRLRLRAEAVRPHSALLAVRVEPGGGAAEEAAPPWALGLGAAGLLALAALARGLQLSALALAPAEVQVLRESGSEAERAAARRLEPARRWAGCALGALLLLASLAQAALAVLLYRAAGQRAVPAVLGSAGLVFLVGEVVPAAVSGRWTLALAPRALGLSRLAVLLTLPVALPVGQLLELAARPGRLRERVLELARGGGDPYSDLSKGVLRCRTVEDVLTPLEDCFMLDASTVLDFGVLASIMQSGHTRIPVYEEERSNIVDMLYLKDLAFVDPEDCTPLSTITRFYNHPLHFVFNDTKLDAVLEEFKRGKSHLAIVQKVNNEGEGDPFYEVLGLVTLEDVIEEIIRSEILDESEDYRDTVVKRKPASLMAPLKRKEEFSLFKVSDDEYKVTISPQLLLATQRFLSREVDVFSPLRISEKVLLHLLKHPSVNQEVRFDESNRLATHHYLYQRSQPVDYFILILQGRVEVEIGKEGLKFENGAFTYYGVSALTVPSSVHQSPVSSLQPIRHDLQPDPGDGTHSSAYCPDYTVRALSDLQLIKVTRLQYLNALLATRAQNLPQSPENTDLQVIPGSQTRLLGEKTTTAAGSSHSRPGVPVEGSPGRNPGV

SEQ ID NO: 3431 - protein, 659 aa, Homo sapiens
MAAAVAAAGRLGWLFAALCLGNAAGEAAPGPRVLGFCLEEDGAAGAGWVRGGAARDTPDATFLLRLFGPGFANSSWSWVAPEGAGCREEAASPAGEWRALLRLRLRAEAVRPHSALLAVRVEPGGGAAEEAAPPWALGLGAAGLLALAALARGLQLSALALAPAEVQVLRESGSEAERAAARRLEPARRWAGCALGALLLLASLAQAALAVLLYRAAGQRAVPAVLGSAGLVFLVGEVVPAAVSGRWTLALAPRALGLSRLAVLLTLPVALPVGQLLELAARPGRLRERVLELARGGGDPYSDLSKGVLRCRTVEDVLTPLEDCFMLDASTVLDFGVLASIMQSGHTRIPVYEEERSNIVDMLYLKDLAFVDPEDCTPLSTITRFYNHPLHFVFNDTKLDAVLEEFKRGDTVVKRKPASLMAPLKRKEEFSLFKVSDDEYKVTISPQLLLATQRFLSREVDVFSPLRISEKVLLHLLKHPSVNQEVRFDESNRLATHHYLYQRSQPVDYFILILQGRVEVEIGKEGLKFENGAFTYYGVSALTVPSSVHQSPVSSLQPIRHDLQPDPGDGTHSSAYCPDYTVRALSDLQLIKVTRLQYLNALLATRAQNLPQSPENTDLQVIPGSQTRLLGEKTTTAAGSSHSRPGVPVEGSPGRNPGV

SEQ ID NO: 3432 - protein, 166 aa, Homo sapiens
MEAGPHPRPGHCCKPGGRLDMNHGFVHHIRRNQIARDDYDKKVKQAAKEKVRRRHTPAPTRPRKPDLQVYLPRHRDVSAHPRNPDYEESGESSSSGGSELEPSGHQLFCLEYEADSGEVTSVIVYQGDDPGKVSEKVSAHTPLDPPMREALKLRIQEEIAKRQSQH

SEQ ID NO: 3433 - protein, 236 aa, Homo sapiens
MAPDPWFSTYDSTCQIAQEIAEKIQQRNQYERKGEKAPKLTVTIRALLQNLKEKIALLKDLLLRAVSTHQITQLEGDRRQNLLDDLVTRERLLLASFKNEGAEPDLIRSSLMSEEAKRGAPNPWLFEEPEETRGLGFDEIRQQQQKIIQEQDAGLDALSSIISRQKQMGQEIGNELDEQNEIIDDLANLVENTDEKLRNETRRVNMVDRKSASCGMIMVILLLLVAIVVVAVWPTN

SEQ ID NO: 3434 - protein, 141 aa, Homo sapiens
MNARGLGSELKDSIPVTELSASGPFESHDLLRKGFSCVKNELLPSHPLELSEKNFQLNQDKMNFSTLRNIQGLFAPLKLQMEFKAVQQVQRLPFLSSSNLSLDVLRGNDETIGFEDILNDPSQSEVMGEPHLMVEYKLGLL

SEQ ID NO: 3435 - protein, 519 aa, Homo sapiens
MASSPAVDVSCRRREKRRQLDARRSKCRIRLGGHMEQWCLLKERLGFSLHSQLAKFLLDRYTSSGCVLCAGPEPLPPKGLQYLVLLSHAHSRECSLVPGLRGPGGQDGGLVWECSAGHTFSWGPSLSPTPSEAPKPASLPHTTRRSWCSEATSGQELADLESEHDERTQEARLPRRVGPPPETFPPPGEEEGEEEEDNDEDEEEMLSDASLWTYSSSPDDSEPDAPRLLPSPVTCTPKEGETPPAPAALSSPLAVPALSASSLSSRAPPPAEVRVQPQLSRTPQAAQQTEALASTGSQAQSAPTPAWDEDTAQIGPKRIRKAAKRELMPCDFPGCGRIFSNRQYLNHHKKYQHIHQKSFSCPEPACGKSFNFKKHLKEHMKLHSDTRDYICEFCARSFRTSSNLVIHRRIHTGEKPLQCEICGFTCRQKASLNWHQRKHAETVAALRFPCEFCGKRFEKPDSVAAHRSKSHPALLLAPQESPSGPLEPCPSISAPGPLGSSEGSRPSASPQAPTLLPQQ

SEQ ID NO: 3436 - protein, 1420 aa, Homo sapiens
MSGLGENLDPLASDSRKRKLPCDTPGQGLTCSGEKRRREQESKYIEELAELISANLSDIDNFNVKPDKCAILKETVRQIRQIKEQGKTISNDDDVQKADVSSTGQGVIDKDSLGPLLLQALDGFLFVVNRDGNIVFVSENVTQYLQYKQEDLVNTSVYNILHEEDRKDFLKNLPKSTVNGVSWTNETQRQKSHTFNCRMLMKTPHDILEDINASPEMRQRYETMQCFALSQPRAMMEEGEDLQSCMICVARRITTGERTFPSNPESFITRHDLSGKVVNIDTNSLRSSMRPGFEDIIRRCIQRFFSLNDGQSWSQKRHYQEAYLNGHAETPVYRFSLADGTIVTAQTKSKLFRNPVTNDRHGFVSTHFLQREQNGYRPNPNPVGQGIRPPMAGCNSSVGGMSMSPNQGLQMPSSRAYGLADPSTTGQMSGARYGGSSNIASLTPGPGMQSPSSYQNNNYGLNMSSPPHGSPGLAPNQQNIMISPRNRGSPKIASHQFSPVAGVHSPMASSGNTGNHSFSSSSLSALQAISEGVGTSLLSTLSSPGPKLDNSPNMNITQPSKVSNQDSKSPLGFYCDQNPVESSMCQSNSRDHLSDKESKESSVEGAENQRGPLESKGHKKLLQLLTCSSDDRGHSSLTNSPLDSSCKESSVSVTSPSGVSSSTSGGVSSTSNMHGSLLQEKHRILHKLLQNGNSPAEVAKITAEATGKDTSSITSCGDGNVVKQEQLSPKKKENNALLRYLLDRDDPSDALSKELQPQVEGVDNKMSQCTSSTIPSSSQEKDPKIKTETSEEGSGDLDNLDAILGDLTSSDFYNNSISSNGSHLGTKQQVFQGTNSLGLKSSQSVQSIRPPYNRAVSLDSPVSVGSSPPVKNISAFPMLPKQPMLGGNPRMMDSQENYGSSMGGPNRNVTVTQTPSSGDWGLPNSKAGRMEPMNSNSMGRPGGDYNTSLPRPALGGSIPTLPLRSNSIPGARPVLQQQQQMLQMRPGEIPMGMGANPYGQAAASNQLGSWPDGMLSMEQVSHGTQNRPLLRNSLDDLVGPPSNLEGQSDERALLDQLHTLLSNTDATGLEEIDRALGIPELVNQGQALEPKQDAFQGQEAAVMMDQKAGLYGQTYPAQGPPMQGGFHLQGQSPSFNSMMNQMNQQGNFPLQGMHPRANIMRPRTNTPKQLRMQLQQRLQGQQFLNQSRQALELKMENPTAGGAAVMRPMMQPQQGFLNAQMVAQRSRELLSHHFRQQRVAMMMQQQQQQQQQQQQQQQQQQQQQQQQQQQQQTQAFSPPPNVTASPSMDGLLAGPTMPQAPPQQFPYQPNYGMGQQPDPAFGRVSSPPNAMMSSRMGPSQNPMMQHPQAASIYQSSEMKGWPSGNLARNSSFSQQQFAHQGNPAVYSMVHMNGSSGHMGQMNMNPMPMSGMPMGPDQKYC

SEQ ID NO: 3437 - protein, 1424 aa, Homo sapiens
MSGLGENLDPLASDSRKRKLPCDTPGQGLTCSGEKRRREQESKYIEELAELISANLSDIDNFNVKPDKCAILKETVRQIRQIKEQGKTISNDDDVQKADVSSTGQGVIDKDSLGPLLLQALDGFLFVVNRDGNIVFVSENVTQYLQYKQEDLVNTSVYNILHEEDRKDFLKNLPKSTVNGVSWTNETQRQKSHTFNCRMLMKTPHDILEDINASPEMRQRYETMQCFALSQPRAMMEEGEDLQSCMICVARRITTGERTFPSNPESFITRHDLSGKVVNIDTNSLRSSMRPGFEDIIRRCIQRFFSLNDGQSWSQKRHYQEAYLNGHAETPVYRFSLADGTIVTAQTKSKLFRNPVTNDRHGFVSTHFLQREQNGYRPNPNPVGQGIRPPMAGCNSSVGGMSMSPNQGLQMPSSRAYGLADPSTTGQMSGARYGGSSNIASLTPGPGMQSPSSYQNNNYGLNMSSPPHGSPGLAPNQQNIMISPRNRGSPKIASHQFSPVAGVHSPMASSGNTGNHSFSSSSLSALQAISEGVGTSLLSTLSSPGPKLDNSPNMNITQPSKVSNQDSKSPLGFYCDQNPVESSMCQSNSRDHLSDKESKESSVEGAENQRGPLESKGHKKLLQLLTCSSDDRGHSSLTNSPLDSSCKESSVSVTSPSGVSSSTSGGVSSTSNMHGSLLQEKHRILHKLLQNGNSPAEVAKITAEATGKDTSSITSCGDGNVVKQEQLSPKKKENNALLRYLLDRDDPSDALSKELQPQVEGVDNKMSQCTSSTIPSSSQEKDPKIKTETSEEGSGDLDNLDAILGDLTSSDFYNNSISSNGSHLGTKQQVFQGTNSLGLKSSQSVQSIRPPYNRAVSLDSPVSVGSSPPVKNISAFPMLPKQPMLGGNPRMMDSQENYGSSMGGPNRNVTVTQTPSSGDWGLPNSKAGRMEPMNSNSMGRPGGDYNTSLPRPALGGSIPTLPLRSNSIPGARPVLQQQQQMLQMRPGEIPMGMGANPYGQAAASNQLGSWPDGMLSMEQVSHGTQNRPLLRNSLDDLVGPPSNLEGQSDERALLDQLHTLLSNTDATGLEEIDRALGIPELVNQGQALEPKQDAFQGQEAAVMMDQKAGLYGQTYPAQGPPMQGGFHLQGQSPSFNSMMNQMNQQGNFPLQGMHPRANIMRPRTNTPKQLRMQLQQRLQGQQFLNQSRQALELKMENPTAGGAAVMRPMMQPQVSSQQGFLNAQMVAQRSRELLSHHFRQQRVAMMMQQQQQQQQQQQQQQQQQQQQQQQQQQQQQTQAFSPPPNVTASPSMDGLLAGPTMPQAPPQQFPYQPNYGMGQQPDPAFGRVSSPPNAMMSSRMGPSQNPMMQHPQAASIYQSSEMKGWPSGNLARNSSFSQQQFAHQGNPAVYSMVHMNGSSGHMGQMNMNPMPMSGMPMGPDQKYC

SEQ ID NO: 3438 - protein, 445 aa, Homo sapiens
MSKLPRELTRDLERSLPAVASLGSSLSHSQSLSSHLLPPPEKRRAISDVRRTFCLFVTFDLLFISLLWIIELNTNTGIRKNLEQEIIQYNFKTSFFDIFVLAFFRFSGLLLGYAVLRLRHWWVIAVTTLVSSAFLIVKVILSELLSKGAFGYLLPIVSFVLAWLETWFLDFKVLPQEAEEERWYLAAQVAVARGPLLFSGALSEGQFYSPPESFAASDNESDEEVAGKKSFSAQEREYIRQGKEATAVVDQILAQEENWKFEKNNEYGDTVYTIEVPFHGKTFILKTFLPCPAELVYQEVILQPERMVLWNKTVTACQILQRVEDNTLISYDVSAGAAGGVVSPRDFVNVRRIERRRDRYLSSGIATSHSAKPPTHKYVRGENGPGGFIVLKSASNPRVCTFVWILNTDLKGRLPRYLIHQSLAATMFEFAFHLRQRISELGARA

SEQ ID NO: 3439 - protein, 135 aa, Homo sapiens
MNPRAIPGPGPYTASHSPFLHLHPLPPPQADRSSPIPPFSSRHFIIDPPFPRPILGLGRGGGSQVGVRRVDKGQLYFSVVAVVALGWEKKDYQAKLFLRKDLGLSLILVRGPKVDEGSERCPFPISTGARTELLL

SEQ ID NO: 3440 - protein, 334 aa, Homo sapiens
MFRVEYASKVDENFDCVEADDVEGKIRQIIPPGFCTNTNDFLSLLEKEVDFKPFGTLLHTYSVLSPTGGENFTFQIYKADMTCRGFREYHERLQTFLMWFIETASFIDVDDERWHYFLVFEKYNKDGATLFATVGYMTVYNYYVYPDKTRPRVSQMLILTPFQGQGHGAQLLETVHRYYTEFPTVLDITAEDPSKSYVKLRDFVLVKLCQDLPCFSREKLMQGFNEDMAIEAQQKFKINKQHARRVYEILRLLVTDMSDAEQYRSYRLDIKRRLISPYKKKQRDLAKMRKCLRPEELTNQMNQIEISMQHEQLEESFQELVEDYRRVIERLAQE

SEQ ID NO: 3441 - protein, 419 aa, Homo sapiens
MAGFGAMEKFLVEYKSAVEKKLAEYKCNTNTAIELKLVRFPEDLENDIRTFFPEYTHQLFGDDETAFGYKGLKILLYYIAGSLSTMFRVEYASKVDENFDCVEADDVEGKIRQIIPPGFCTNTNDFLSLLEKEVDFKPFGTLLHTYSVLSPTGGENFTFQIYKADMTCRGFREYHERLQTFLMWFIETASFIDVDDERWHYFLVFEKYNKDGATLFATVGYMTVYNYYVYPDKTRPRVSQMLILTPFQGQGHGAQLLETVHRYYTEFPTVLDITAEDPSKSYVKLRDFVLVKLCQDLPCFSREKLMQGFNEDMAIEAQQKFKINKQHARRVYEILRLLVTDMSDAEQYRSYRLDIKRRLISPYKKKQRDLAKMRKCLRPEELTNQMNQIEISMQHEQLEESFQELVEDYRRVIERLAQE

SEQ ID NO: 3442 - protein, 1601 aa, Homo sapiens
MNSPVDPGARQALRKKPPERTPEDLNTIYSYLHGMEILSNLREHQLRLMSARARYERYSGNQVLFCSETIARCWYILLSGSVLVKGSMVLPPCSFGKQFGGKRGCDCLVLEPSEMIVVENAKDNEDSILQREIPARQSRRRFRKINYKGERQTITDDVEVNSYLSLPADLTKMHLTENPHPQVTHVSSSQSGCSIASDSGSSSLSDIYQATESEVGDVDLTRLPEGPVDSEDDEEEDEEIDRTDPLQGRDLVRECLEKEPADKTDDDIEQLLEFMHQLPAFANMTMSVRRELCSVMIFEVVEQAGAIILEDGQELDSWYVILNGTVEISHPDGKVENLFMGNSFGITPTLDKQYMHGIVRTKVDDCQFVCIAQQDYWRILNHVEKNTHKVEEEGEIVMVHEHRELDRSGTRKGHIVIKATPERLIMHLIEEHSIVDPTYIEDFLLTYRTFLESPLDVGIKLLEWFKIDSLRDKVTRIVLLWVNNHFNDFEGDPAMTRFLEEFEKNLEDTKMNGHLRLLNIACAAKAKWRQVVLQKASRESPLQFSLNGGSEKGFGIFVEGVEPGSKAADSGLKRGDQIMEVNGQNFENITFMKAVEILRNNTHLALTVKTNIFVFKELLFRTEQEKSGVPHIPKIAEKKSNRHSIQHVPGDIEQTSQEKGSKKVKANTVSGGRNKIRKILDKTRFSILPPKLFSDGGLSQSQDDSIVGTRHCRHSLAIMPIPGTLSSSSPDLLQPTTSMLDFSNPSDIPDQVIRVFKVDQQSCYIIISKDTTAKEVVFHAVHEFGLTGASDTYSLCEVSVTPEGVIKQRRLPDQFSKLADRIQLNGRYYLKNNMETETLCSDEDAQELVKESQLSMLQLSTIEVATQLSMRDFDLFRNIEPTEYIDDLFKLNSKTGNTHLKRFEDIVNQETFWVASEILTEANQLKRMKIIKHFIKIALHCRECKNFNSMFAIISGLNLASVARLRGTWEKLPSKYEKHLQDLQDIFDPSRNMAKYRNILSSQSMQPPIIPLFPVVKKDMTFLHEGNDSKVDGLVNFEKLRMISKEIRQVVRMTSANMDPAMMFRQRSLSQGSTNSNMLDVQGGAHKKRARRSSLLNAKKLYEDAQMARKVKQYLSSLDVETDEEKFQMMSLQWEPAYGTLTKNLSEKRSAKSSEMSPVPMRSAGQTTKAHLHQPHRVSQVLQVPAVNLHPIRKKGQTKDPALNTSLPQKVLGTTEEISGKKHTEDTISVASSLHSSPPASPQGSPHKGYTLIPSAKSDNLSDSSHSEISSRSSIVSNCSVDSMSAALQDERCSSQALAVPESTGALEKTEHASGIGDHSQHGPGWTLLKPSLIKCLAVSSSVSNEEISQEHIIIEAADSGRGSWTSCSSSSHDNFQSLPNPKSWDFLNSYRHTHLDDPIAEVEPTDSEPYSCSKSCSRTCGQCKGSLERKSWTSSSSLSDTYEPNYGTVKRRVLESTPAESSEGLDPKDATDPVYKTVTSSTEKGLIVYCVTSPKKDDRYREPPPTPPGYLGISLADLKEGPHTHLKPPDYSVAVQRSKMMHNSLSRLPPASLSSNLVACVPSKIVTQPQRHNLQPFHPKLGDVTDADSEADENEQVSAV

SEQ ID NO: 3443 - protein, 734 aa, Homo sapiens
MRPAVLGSPDRAPPEDEGPVMVKLEDSEEEGEAALWDPGPEAARLRFRCFRYEEATGPQEALAQLRELCRQWLRPEVRSKEQMLELLVLEQFLGALPPEIQARVQGQRPGSPEEAAALVDGLRREPGGPRRWVTVQVQGQEVLSEKMEPSSFQPLPETEPPTPEPGPKTPPRTMQESPLGLQVKEESEVTEDSDFLESGPLAATQESVPTLLPEEAQRCGTVLDQIFPHSKTGPEGPSWREHPRALWHEEAGGIFSPGFALQLGSISAGPGSVSPHLHVPWDLGMAGLSGQIQSPSREGGFAHALLLPSDLRSEQDPTDEDPCRGVGPALITTRWRSPRGRSRGRPSTGGGVVRGGRCDVCGKVFSQRSNLLRHQKIHTGERPFVCSECGRSFSRSSHLLRHQLTHTEERPFVCGDCGQGFVRSARLEEHRRVHTGEQPFRCAECGQSFRQRSNLLQHQRIHGDPPGPGAKPPAPPGAPEPPGPFPCSECRESFARRAVLLEHQAVHTGDKSFGCVECGERFGRRSVLLQHRRVHSGERPFACAECGQSFRQRSNLTQHRRIHTGERPFACAECGKAFRQRPTLTQHLRVHTGEKPFACPECGQRFSQRLKLTRHQRTHTGEKPYHCGECGLGFTQVSRLTEHQRIHTGERPFACPECGQSFRQHANLTQHRRIHTGERPYACPECGKAFRQRPTLTQHLRTHRREKPFACQDCGRRFHQSTKLIQHQRVHSAE

SEQ ID NO: 3444 - protein, 734 aa, Homo sapiens; identical to SEQ ID NO: 3443

SEQ ID NO: 3445 - protein, 137 aa, Homo sapiens
MAGRKLALKTIDWVAFAEIIPQNQKAIASSLKSWNETLTSRLAALPENPPAIDWAYYKANVAKAGLVDDFEKKVKSCAEWVSLSKARIVEYEKEMEKMKNLIPFDQMTIEDLNEAFPETKLDKKKYPYWPHQPIENL

SEQ ID NO: 3446 - protein, 161 aa, Homo sapiens
MAGRKLALKTIDWVAFAEIIPQNQKAIASSLKSWNETLTSRLAALPENPPAIDWAYYKANVAKAGLVDDFEKKFNALKVPVPEDKYTAQVDAEEKEDVKSCAEWVSLSKARIVEYEKEMEKMKNLIPFDQMTIEDLNEAFPETKLDKKKYPYWPHQPIENL

SEQ ID NO: 3447 - protein, 764 aa, Homo sapiens
MNGEADCPTDLEMAAPKGQDRWSQEDMLTLLECMKNNLPSNDSSKFKTTESHMDWEKVAFKDFSGDMCKLKWVEISNEVRKFRTLTELILDAQEHVKNPYKGKKLKKHPDFPKKPLTPYFRFFMEKRAKYAKLHPEMSNLDLTKILSKKYKELPEKKKMKYIQDFQREKQEFERNLARFREDHPDLIQNAKKSDIPEKPKTPQQLWYTHEKKVYLKVRPDATTKEVKDSLGKQWSQLSDKKRLKWIHKALEQRKEYEEIMRDYIQKHPELNISEEGITKSTLTKAERQLKDKFDGRPTKPPPNSYSLYCAELMANMKDVPSTERMVLCSQQWKLLSQKEKDAYHKKCDQKKKDYEVELLRFLESLPEEEQQRVLGEEKMLNINKKQATSPASKKPAQEGGKGGSEKPKRPVSAMFIFSEEKRRQLQEERPELSESELTRLLARMWNDLSEKKKAKYKAREAALKAQSERKPGGEREERGKLPESPKRAEEIWQQSVIGDYLARFKNDRVKALKAMEMTWNNMEKKEKLMWIKKAAEDQKRYERELSEMRAPPAATNSSKKMKFQGEPKKPPMNGYQKFSQELLSNGELNHLPLKERMVEIGSRWQRISQSQKEHYKKLAEEQQKQYKVHLDLWVKSLSPQDRAAYKEYISNKRKSMTKLRGPNPKSSRTTLQSKSESEEDDEEDEDDEDEDEEEEDDENGDSSEDGGDSSESSSEDESEDGDENEEDDEDEDDDEDDDEDEDNESEGSSSSSSSSGDSSDSDSN

SEQ ID NO: 3448 - protein, 233 aa, Homo sapiens
MWSGLLPPGLNESDAESNSEDEATLENSGLNLQEDKEDESIRKTEIIDFSTDEPKTETESNVNAYEECPSGIPIDMWNKFQELHKKHSEQKSTTSRFRGKRRKRSRKDKLKNEKELHSEPSSNETQWKELTQYFGVNDRFDPPVKRKKVEKSGLEKRIDQAVEEWNIEKAEELSNQLATRELGVKIAKAVACHNFVKAKKEVENSQAARKKKKLAWGFEAKKRWETKSNMGYM

SEQ ID NO: 3449 - protein, 1187 aa, Homo sapiens
MPLRHWGMARGSKPVGDGAQPMAAMGGLKVLLHWAGPGGGEPWVTFSESSLTAEEVCIHIAHKVGITPPCFNLFALFDAQAQVWLPPNHILEIPRDASLMLYFRIRFYFRNWHGMNPREPAVYRCGPPGTEASSDQTAQGMQLLDPASFEYLFEQGKHEFVNDVASLWELSTEEEIHHFKNESLGMAFLHLCHLALRHGIPLEEVAKKTSFKDCIPRSFRRHIRQHSALTRLRLRNVFRRFLRDFQPGRLSQQMVMVKYLATLERLAPRFGTERVPVCHLRLLAQAEGEPCYIRDSGVAPTDPGPESAAGPPTHEVLVTGTGGIQWWPVEEEVNKEEGSSGSSGRNPQASLFGKKAKAHKAVGQPADRPREPLWAYFCDFRDITHVVLKEHCVSIHRQDNKCLELSLPSRAAALSFVSLVDGYFRLTADSSHYLCHEVAPPRLVMSIRDGIHGPLLEPFVQAKLRPEDGLYLIHWSTSHPYRLILTVAQRSQAPDGMQSLRLRKFPIEQQDGAFVLEGWGRSFPSVRELGAALQGCLLRAGDDCFSLRRCCLPQPGETSNLIIMRGARASPRTLNLSQLSFHRVDQKEITQLSHLGQGTRTNVYEGRLRVEGSGDPEEGKMDDEDPLVPGRDRGQELRVVLKVLDPSHHDIALAFYETASLMSQVSHTHLAFVHGVCVRGPENIMVTEYVEHGPLDVWLRRERGHVPMAWKMVVAQQLASALSYLENKNLVHGNVCGRNILLARLGLAEGTSPFIKLSDPGVGLGALSREERVERIPWLAPECLPGGANSLSTAMDKWGFGATLLEICFDGEAPLQSRSPSEKEHFYQRQHRLPEPSCPQLATLTSQCLTYEPTQRPSFRTILRDLTRLQPHNLADVLTVNPDSPASDPTVFHKRYLKKIRDLGEGHFGKVSLYCYDPTNDGTGEMVAVKALKADCGPQHRSGWKQEIDILRTLYHEHIIKYKGCCEDQGEKSLQLVMEYVPLGSLRDYLPRHSIGLAQLLLFAQQICEGMAYLHSQHYIHRDLAARNVLLDNDRLVKIGDFGLAKAVPEGHEYYRVREDGDSPVFWYAPECLKEYKFYYASDVWSFGVTLYELLTHCDSSQSPPTKFLELIGIAQGQMTVLRLTELLERGERLPRPDKCPCEVYHLMKNCWETEASFRPTFENLIPILKTVHEKYQGQAPSVFSVC

SEQ ID NO: 3450 - protein, 644 aa, Homo sapiens
MPSKAENLRPSEPAPQPPEGRTLQGQLPGAPPAQRAGSPPDAPGSESPALACSTPATPSGEDPPARAAPIAPRPPARPRLERALSLDDKGWRRRRFRGSQEDLEARNGTSPSRGSVQSEGPGAPAHSCSPPCLSTSLQEIPKSRGVLSSERGSPSSGGNPLSGVASSSPNLPHRDAAVAGSSPRLPSLLPPRPPPALSLDIASDSLRTANKVDSDLADYKLRAQPLLVRAHSSLGPGRPRSPLACDDCSLRSAKSSFSLLAPIRSKDVRSRSYLEGSLLASGALLGADELARYFPDRNVALFVATWNMQGQKELPPSLDEFLLPAEADYAQDLYVIGVQEGCSDRREWETRLQETLGPHYVLLSSAAHGVLYMSLFIRRDLIWFCSEVECSTVTTRIVSQIKTKGALGISFTFFGTSFLFITSHFTSGDGKVAERLLDYTRTVQALVLPRNVPDTNPYRSSAADVTTRFDEVFWFGDFNFRLSGGRTVVDALLCQGLVVDVPALLQHDQLIREMRKGSIFKGFQEPDIHFLPSYKFDIGKDTYDSTSKQRTPSYTDRVLYRSRHKGDICPVSYSSCPGIKTSDHRPVYGLFRVKVRPGRDNIPLAAGKFDRELYLLGIKRRISKEIQRQQALQSQNSSTICSVS

SEQ ID NO: 3451 - protein, 777 aa, Homo sapiens
MLPRPLRLLLDTSPPGGVVLSSFRSRDPEEGGGPGGLVVGGGQEEEEEEEEEAPVSVWDEEEDGAVFTVTSRQYRPLDPLVPMPPPRSSRRLRAGTLEALVRHLLDTRTSGTDVSFMSAFLATHRAFTSTPALLGLMADRLEALESHPTDELERTTEVAISVLSTWLASHPEDFGSEAKGQLDRLESFLLQTGYAAGKGVGGGSADLIRNLRSRVDPQAPDLPKPLALPGDPPADPTDVLVFLADHLAEQLTLLDAELFLNLIPSQCLGGLWGHRDRPGHSHLCPSVRATVTQFNKVAGAVVSSVLGATSTGEGPGEVTIRPLRPPQRARLLEKWIRVAEECRLLRNFSSVYAVVSALQSSPIHRLRAAWGEATRDSLRVFSSLCQIFSEEDNYSQSRELLVQEVKLQSPLEPHSKKAPRSGSRGGGVVPYLGTFLKDLVMLDAASKDELENGYINFDKRRKEFAVLSELRRLQNECRGYNLQPDHDIQRWLQGLRPLTEAQSHRVSCEVEPPGSSDPPAPRVLRPTLVISQWTEVLGSVGVPTPLVSCDRPSTGGDEAPTTPAPLLTRLAQHMKWPSVSSLDSALESSPSLHSPADPSHLSPPASSPRPSRGHRRSASCGSPLSGGAEEASGGTGYGGEGSGPGASDCRIIRVQMELGEDGSVYKSILVTSQDKAPSVISRVLKKNNRDSAVASEYELVQLLPGERELTIPASANVFYAMDGASHDFLLRQRRRSSTATPGVTSGPSASGTPPSEGGGGSFPRIKATGRKIARALF

SEQ ID NO: 3452 - protein, 335 aa, Homo sapiens
MLQGHSSVFQALLGTFFTWGMTAAGAALVFVFSSGQRRILDGSLGFAAGVMLAASYWSLLAPAVEMATSSGGFGAFAFFPVAVGFTLGAAFVYLADLLMPHLGAAEDPQTALALNFGSTLMKKKSDPEGPALLFPESELSIRIDKSENGEAYQRKKAAATGLPEGPAVPVPSRGNLAQPGGSSWRRIALLILAITIHNVPEGLAVGVGFGAIEKTASATFESARNLAIGIGIQNFPEGLAVSLPLRGAGFSTWRAFWYGQLSGMVEPLAGVFGAFAVVLAEPILPYALAFAAGAMVYVVMDDIIPEAQISGNGKLASWASILGFVVMMSLDVGLG

SEQ ID NO: 3453 - protein, 406 aa, Homo sapiens
MASPRTRKVLKEVRVQDENNVCFECGAFNPQWVSVTYGIWICLECSGRHRGLGVHLSFVRSVTMDKWKDIELEKMKAGGNAKFREFLESQEDYDPCWSLQEKYNSRAAALFRDKVVALAEGREWSLESSPAQNWTPPQPRTLPSMVHRVSGQPQSVTASSDKAFEDWLNDDLGSYQGAQGNRYVGFGNTPPPQKKEDDFLNNAMSSLYSGWSSFTTGASRFASAAKEGATKFGSQASQKASELGHSLNENVLKPAQEKVKEGKIFDDVSSGVSQLASKVQGVGSKGWRDVTTFFSGKAEGPLDSPSEGHSYQNSGLDHFQNSNIDQSFWETFGSAEPTKTRKSPSSDSWTCADTSTERRSSDSWEVWGSASTNRNSNSDGGEGGEGTKKAVPPAVPTDDGWDNQNW

SEQ ID NO: 3454 - protein, 414 aa, Homo sapiens
MASPRTRKVLKEVRVQDENNVCFECGAFNPQWVSVTYGIWICLECSGRHRGLGVHLSFVRSVTMDKWKDIELEKMKAGGNAKFREFLESQEDYDPCWSLQEKYNSRAAALFRDKVVALAEGREWSLESSPAQNWTPPQPRTLPSMVHRVSGQPQSVTASSDKAFEDWLNDDLGSYQGAQGNRYVGFGNTPPPQKKEDDFLNNAMSSLYSGWSSFTTGASRFASAAKEGATKFGSQASQKFWGHKQQPEPASELGHSLNENVLKPAQEKVKEGKIFDDVSSGVSQLASKGVGSKGWRDVTTFFSGKAEGPLDSPSEGHSYQNSGLDHFQNSNIDQSFWETFGSAEPTKTRKSPSSDSWTCADTSTERRSSDSWEVWGSASTNRNSNSDGGEGGEGTKKAVPPAVPTDDGWDNQNW

SEQ ID NO: 3455 - protein, 459 aa, Homo sapiens
MTAEEMKATESGAQSAPLPMEGVDISPKQDEGVLKVIKREGTGTEMPMIGDRVFVHYTGWLLDGTKFDSSLDRKDKFSFDLGKGEVIKAWDIAIATMKVGEVCHITCKPEYAYGSAGSPPKIPPNATLVFEVELFEFKGEDLTEEEDGGIIRRIQTRGEGYAKPNEGAIVEVALEGYYKDKLFDQRELRFEIGEGENLDLPYGLERAIQRMEKGEHSIVYLKPSYAFGSVGKEKFQIPPNAELKYELHLKSFEKAKESWEMNSEEKLEQSTIVKERGTVYFKEGKYKQALLQYKKIVSWLEYESSFSNEEAQKAQALRLASHLNLAMCHLKLQAFSAAIESCNKALELDSNNEKGLFRRGEAHLAVNDFELARADFQKVLQLYPNNKAAKTQLAVCQQRIRRQLAREKKLYANMFERLAEEENKAKAEASSGDHPTDTEMKEEQKSNTAGSQSQVETEA

SEQ ID NO: 3456 - protein, 346 aa, Homo sapiens
MLKSRLRMFLNELKLLVLTGGGRPRAEPQPRGGRGGGCGWAPFAGCSTRDGDGDEEEYYGSEPRARGLAGDKEPRAGPLPPPAPPLPPPGALDALSLSSSLDSGLRTPQCRICFQGPEQGELLSPCRCDGSVRCTHQPCLIRWISERGSWSCELCYFKYQVLAISTKNPLQWQAISLTVIEKVQIAAIVLGSLFLVASISWLIWSSLSPSAKWQRQDLLFQICYGMYGFMDVVCIGLIIHEGSSVYRIFKRWQAVNQQWKVLNYDKTKDIGGDAGGGTAGKSGPRNSRTGPTSGATSRPPAAQRMRTLLPQRCGYTILHLLGQLRPPDARSSSHSGREVVMRVTTV

SEQ ID NO: 3457 - protein, 572 aa, Homo sapiens
MSYQGKKNIPRITSDRLLIKGGKIVNDDQSFYADIYMEDGLIKQIGENLIVPGGVKTIEAHSRMVIPGGIDVHTRFQMPDQGMTSADDFFQGTKAALAGGTTMIIDHVVPEPGTSLLAAFDQWREWADSKSCCDYSLHVDISEWHKGIQEEMEALVKDHGVNSFLVYMAFKDRFQLTDCQIYEVLSVIRDIGAIAQVHAENGDIIAEEQQRILDLGITGPEGHVLSRPEEVEAEAVNRAITIANQTNCPLYITKVMSKSSAEVIAQARKKGTVVYGEPITASLGTDGSHYWSKNWAKAAAFVTSPPLSPDPTTPDFLNSLLSCGDLQVTGSAHCTFNTAQKAVGKDNFTLIPEGTNGTEERMSVIWDKAVVTGKMDENQFVAVTSTNAAKVFNLYPRKGRIAVGSDADLVIWDPDSVKTISAKTHNSSLEYNIFEGMECRGSPLVVISQGKIVLEDGTLHVTEGSGRYIPRKPFPDFVYKRIKARSRLAELRGVPRGLYDGPVCEVSVTPKTVTPASSAKTSPAKQQAPPVRNLHQSGFSLSGAQIDDNIPRRTTQRIVAPPGGRANITSLG

SEQ ID NO: 3458 - protein, 381 aa, Homo sapiens
MSRHEGVSCDACLKGNFRGRRYKCLICYDYDLCASCYESGATTTRHTTDHPMQCILTRVDFDLYYGGEAFSVEQPQSFTCPYCGKMGYTETSLQEHVTSEHAETSTEVICPICAALPGGDPNHVTDDFAAHLTLEHRAPRDLDESSGVRHVRRMFHPGRGLGGPRARRSNMHFTSSSTGGLSSSQSSYSPSNREAMDPIAELLSQLSGVRRSAGGQLNSSGPSASQLQQLQMQLQLERQHAQAARQQLETARNATRRTNTSSVTTTITQSTATTNIANTESSQQTLQNSQFLLTRLNDPKMSETERQSMESERADRSLFVQELLLSTLVREESSSSDEDDRGEMADFGAMGCVDIMPLDVALENLNLKESNKGNEPPPPPL

SEQ ID NO: 3459 - protein, 576 aa, Homo sapiens
MQVPQDGEDLAGQPWYHGLLSRQKAEALLQQDGDFLVRASGSRGGNPVISCRWRGSALHFEVFRVALRPRPGRPTALFQLEDEQFPSIPALVHSYMTGRRPLSQATGAVVSRPVTWQGPLRRSFSEDTLMDGPARIEPLRARKWSNSQPADLAHMGRSREDPAGMEASTMPISALPRTSSDPVLLKAPAPLGTVADSLRASDGQLQAKAPTKPPRTPSFELPDASERPPTYCELVPRVPSVQGTSPSQSCPEPEAPWWEAEEDEEEENRCFTRPQAEISFCPHDAPSCLLGPQNRPLEPQVLHTLRGLFLEHHPGSTALHLLLVDCQATGLLGVTRDQRGNMGVSSGLELLTLPHGHHLRLELLERHQTLALAGALAVLGCSGPLEERAAALRGLVELALALRPGAAGDLPGLAAVMGALLMPQVSRLEHTWRQLRRSHTEAALAFEQELKPLMRALDEGAGPCDPGEVALPHVAPMVRLLEGEEVAGPLDESCERLLRTLHGARHMVRDAPKFRKVAAQRLRGFRPNPELREALTTGFVRRLLWGSRGAGAPRAERFEKFQRVLGVLSQRLEPDR

SEQ ID NO: 3460 - protein, 383 aa, Homo sapiens
MAGIPGLLFLLFFLLCAVGQVSPYSAPWKPTWPAYRLPVVLPQSTLNLAKPDFGAEAKLEVSSSCGPQCHKGTPLPTYEEAKQYLSYETLYANGSRTETQVGIYILSSSGDGAQHRDSGSSGKSRRKRQIYGYDSRFSIFGKDFLLNYPFSTSVKLSTGCTGTLVAEKHVLTAAHCIHDGKTYVKGTQKLRVGFLKPKFKDGGRGANDSTSAMPEQMKFQWIRVKRTHVPKGWIKGNANDIGMDYDYALLELKKPHKRKFMKIGVSPPAKQLPGGRIHFSGYDNDRPGNLVYRFCDVKDETYDLLYQQCDAQPGASGSGVYVRMWKRQQQKWERKIIGIFSGHQWVDMNGSPQDFNVAVRITPLKYAQICYWIKGNYLDCREG

SEQ ID NO: 3461 - protein, 520 aa, Homo sapiens
MGPQRRLSPAGAALLWGFLLQLTAAQEAILHASGNGTTKDYCMLYNPYWTALPSTLENATSISLMNLTSTPLCNLSDIPPVGIKSKAVVVPWGSCHFLEKARIAQKGGAEAMLVVNNSVLFPPSGNRSEFPDVKILIAFISYKDFRDMNQTLGDNITVKMYSPSWPNFDYTMVVIFVIAVFTVALGGYWSGLVELENLKAVTTEDREMRKKKEEYLTFSPLTVVIFVVICCVMMVLLYFFYKWLVYVMIAIFCIASAMSLYNCLAALIHKIPYGQCTIACRGKNMEVRLIFLSGLCIAVAVVWAVFRNEDRWAWILQDILGIAFCLNLIKTLKLPNFKSCVILLGLLLLYDVFFVFITPFITKNGESIMVELAAGPFGNNEKLPVVIRVPKLIYFSVMSVCLMPVSILGFGDIIVPGLLIAYCRRFDVQTGSSYIYYVSSTVAYAIGMILTFVVLVLMKKGQPALLYLVPCTLITASVVAWRRKEMKKFWKGNSYQMMDHLDCATNEENPVISGEQIVQQ

SEQ ID NO: 3462 - protein, 1512 aa, Homo sapiens
MPSSSDTALGGGGGLSWAEKRLEERRKRRRFLSPQQPPLLLPLLQPQLLQPPPPPPPLLFLAAPGTAAAAAAAAAASSSCFSPGPPLEVKRLARGKRRAGGRQKRRRGPRAGQEAEKRRVFSLPQPQQDGGGGASSGGGVTPLVEYEDVSSQSEQGLLLGGASAATAATAAGGTGGSGGSPASSSGTQRRGEGSERRPRRDRRSSSGRSKERHREHRRRDGQRGGSEASKSRSRHSHSGEERAEVAKSGSSSSSGGRRKSASATSSSSSSRKDRDSKAHRSRTKSSKEPPSAYKEPPKAYREDKTEPKAYRRRRSLSPLGGRDDSPVSHRASQSLRSRKSPSPAGGGSSPYSRRLPRSPSPYSRRRSPSYSRHSSYERGGDVSPSPYSSSSWRRSRSPYSPVLRRSGKSRSRSPYSSRHSRSRSRHRLSRSRSRHSSISPSTLTLKSSLAAELNKNKKARAAEAARAAEAAKAAEATKAAEAAAKAAKASNTSTPTKGNTETSASASQTNHVKDVKKIKIEHAPSPSSGGTLKNDKAKTKPPLQVTKVENNLIVDKATKKAVIVGKESKSAATKEESVSLKEKTKPLTPSIGAKEKEQHVALVTSTLPPLPLPPMLPEDKEADSLRGNISVKAVKKEVEKKLRCLLADLPLPPELPGGDDLSKSPEEKKTTTQLHSKRRPKICGPRYGETKEKDIDWGKLCVDKFDIIGIIGEGTYGQVYKARDKDTGEMVALKKVRLDNEKEGFPITAIREIKILRQLTHQSIINMKEIVTDKEDALDFKKDKGAFYLVFEYMDHDLMGLLESGLVHFNENHIKSFMRQLMEGLDYCHKKNFLHRDIKCSNILLNNRGQIKLADFGLARLYSSEESRPYTNKVITLWYRPPELLLGEERYTPAIDVWSCGCILGELFTKKPIFQANQELAQLELISRICGSPCPAVWPDVIKLPYFNTMKPKKQYRRKLREEFVFIPAAALDLFDYMLALDPSKRCTAEQALQCEFLRDVEPSKMPPPDLPLWQDCHELWSKKRRRQKQMGMTDDVSTIKAPRKDLSLGLDDSRTNTPQGVLPSSQLKSQGSSNVAPVKTGPGQHLNHSELAILLNLLQSKTSVNMADFVQVLNIKVNSETQQQLNKINLPAGILATGEKQTDPSTPQQESSKPLGGIQPSSQTIQPKMETDAAQAAVQSAFAVLLTQLIKAQQSKQKDVLLEERENGSGHEASLQLRPPPEPSTPVSGQDDLIQHQDMRILELTPEPDRPRILPPDQRPPEPPEPPPVTEEDLDYRTENQHVPTTSSSLTDPHAGVKAALLQLLAQHQPQDDPKREGGIDYQAGDTYVSTSDYKDNFGSSSFSSAPYVSNDGLGSSSAPPLERRSFIGNSDIQSLDNYSTASSHSGGPPQPSAFSESFPSSVAGYGDIYLNAGPMLFSGDKDHRFEYSHGPIAVLANSSDPSTGPESTHPLPAKMHNYNYGGNLQENPSGPSLMHGQTWTSPAQGPGYSQGYRGHISTSTGRGRGRGLPY

SEQ ID NO: 3463 - protein, 1452 aa, Homo sapiens
MPSSSDTALGGGGGLSWAEKRLEERRKRRRFLSPQQPPLLLPLLQPQLLQPPPPPPPLLFLAAPGTAAAAAAAAAASSSCFSPGPPLEVKRLARGKRRAGGRQKRRRGPRAGQEAEKRRVFSLPQPQQDGGGGASSGGGVTPLVEYEDVSSQSEQGLLLGGASAATAATAAGGTGGSGGSPASSSGTQRRGEGSERRPRRDRRSSSGRSKERHREHRRRDGQRGGSEASKSRSRHSHSGEERAEVAKSGSSSSSGGRRKSASATSSSSSSRKDRDSKAHRSRTKSSKEPPSAYKEPPKAYREDKTEPKAYRRRRSLSPLGGRDDSPVSHRASQSLRSRKSPSPAGGGSSPYSRRLPRSPSPYSRRRSPSYSRHSSYERGGDVSPSPYSSSSWRRSRSPYSPVLRRSGKSRSRSPYSSRHSRSRSRHRLSRSRSRHSSISPSTLTLKSSLAAELNKNKKARAAEAARAAEAAKAAEATKAAEAAAKAAKASNTSTPTKGNTETSASASQTNHVKDVKKIKIEHAPSPSSGGTLKNDKAKTKPPLQVTKVENNLIVDKATKKAVIVGKESKSAATKEESVSLKEKTKPLTPSIGAKEKEQHVALVTSTLPPLPLPPMLPEDKEADSLRGNISVKAVKKEVEKKLRCLLADLPLPPELPGGDDLSKSPEEKKTTTQLHSKRRPKICGPRYGETKEKDIDWGKLCVDKFDIIGIIGEGTYGQVYKARDKDTGEMVALKKVRLDNEKEGFPITAIREIKILRQLTHQSIINMKEIVTDKEDALDFKKDKGAFYLVFEYMDHDLMGLLESGLVHFNENHIKSFMRQLMEGLDYCHKKNFLHRDIKCSNILLNNRGQIKLADFGLARLYSSEESRPYTNKVITLWYRPPELLLGEERYTPAIDVWSCGCILGELFTKKPIFQANQELAQLELISRICGSPCPAVWPDVIKLPYFNTMKPKKQYRRKLREEFVFIPAAALDLFDYMLALDPSKRCTAEQALQCEFLRDVEPSKMPPPDLPLWQDCHELWSKKRRRQKQMGMTDDVSTIKAPRKDLSLGLDDSRTNTPQGVLPSSQLKSQGSSNVAPGEKQTDPSTPQQESSKPLGGIQPSSQTIQPKMETDAAQAAVQSAFAVLLTQLIKAQQSKQKDVLLEERENGSGHEASLQLRPPPEPSTPVSGQDDLIQHQDMRILELTPEPDRPRILPPDQRPPEPPEPPPVTEEDLDYRTENQHVPTTSSSLTDPHAGVKAALLQLLAQHQPQDDPKREGGIDYQAGDTYVSTSDYKDNFGSSSFSSAPYVSNDGLGSSSAPPLERRSFIGNSDIQSLDNYSTASSHSGGPPQPSAFSESFPSSVAGYGDIYLNAGPMLFSGDKDHRFEYSHGPIAVLANSSDPSTGPESTHPLPAKMHNYNYGGNLQENPSGPSLMHGQTWTSPAQGPGYSQGYRGHISTSTGRGRGRGLPY

SEQ ID NO: 3464 - protein, 243 aa, Homo sapiens
MAAIAASEVLVDSAEEGSLAAAAELAAQKREQRLRKFRELHLMRNEARKLNHQEVVEEDKRLKLPANWEAKKARLEWELKEEEKKKECAARGEDYEKVKLLEISAEDAERWERKKKRKNPDLGFSDYAAAQLRQYHRLTKQIKPDMETYERLREKHGEEFFPTSNSLLHGTHVPSTEEIDRMVIDLEKQIEKRDKYSRRRPYNDDADIDYINERNAKFNKKAERFYGKYTAEIKQNLERGTAV

SEQ ID NO: 3465 - protein, 201 aa, Homo sapiens
MAAIAASEVLVDSAEEGSLAAAAELAAQKREQRLRKFRELHLMRECAARGEDYEKVKLLEISAEDAERWERKKKRKNPDLGFSDYAAAQLRQYHRLTKQIKPDMETYERLREKHGEEFFPTSNSLLHGTHVPSTEEIDRMVIDLEKQIEKRDKYSRRRPYNDDADIDYINERNAKFNKKAERFYGKYTAEIKQNLERGTAV

SEQ ID NO: 3466 - protein, 2533 aa, Homo sapiens
MVLELPIQNEPPGQAAAEEKHTCVVQYILFPPHSTSTKDSFSTDDDNDVEVEALEGDSELNLVTEVWVEPQYGRVGPGPGIWKHLQDLTYSEIPQALHPRDAACIGSMLSFEYLIQLCQSKEWGPLPPEPRVSDGLDQGGDTCVHEIPFHFDLMGLLPQCQQLQMFFLLLARGAEGPLLGVHGIPKEQAVGSTQATGDSAFTSLSVGLPETLKPLISAQPPQWRCYARLVNPQHVFLTFLPATFSDVQRLAACGLEGPPQEETKPKFGDWSGAPSLKDLGGTGIKATKSHVPVLSVTLASDNAQNQGELSPPFRRDLQAYAGRQASQTESADGPRTRCPVYIYSCSLEALREQMVGMQPPQAPRDLIFRTQFLDHPSPSSAWMEPRYKEAANHCALLQEHAQRCYVRGLFRSLQQAQSVTSQDLLTAVDACEELLQEIDITPFLLALCGHTWGLPHAPPSPGPLSPGPFSSSMEEGAEPRERAILASESSIETEDLSEPEFQSTRVPGIPDPGPEISLTDVCQLRGEAHGALHSVIQEKFLEISRLHFRTVPSNPHYFFYCPPSSRREDEGPRDTVDRKISDLEFSEAELMGEEGDTSACCVVTESDPELEVEYRESRESDLGPAGLDSASLSDVDTVNPDEDSFSILGGDSPTGPESFLHDLPPLFLHLTCSVRLRGQHSSVPVCSLPTCLGQVLSSLEGPPVGGRVPLRDLSVTLDVFMLTLPLEVELPTASDPQHHRSTSESSASFPRSPGQPSSLRSDDGLGPPLPPPEEERHPGLSNLATPHRLAIETTMNEIRWLLEDEMVGALRRGGIPQSPALHRAAAHIHSSPGRSTCLRQTLPLSFVFGPERSLTQFKEEFRRLHLPGHVLLEDPDSGFFFVAAGQQPGGSHGEPSSAAWAWHSHEDRAEGIEGETLTASPQAPGSPEDSEGVPLISLPRVPQGGSQPGPSRGLSLMSSQGSVDSDHLGYDGGSSGSDSEGPNDTLGEKAPFTLRTPPGPAPPQPSLSGLPGPCLPDFWLIVRVLQDRVEVYAHARSLIREDGGPGTECRHLQQLLVRRVGEICREVNQRLLLQDLHDSHVCNSLLVAESEEDLWRSETPFHSRQRAPLPSDDYAADESCAPRGYLAATMQFVPGHFSCDVVWGTVIRVHSRLKMGPSMGVSRAIQALRSVLNAFSVVNRKNMFVYQERATKAVYYLRLLETSCSDRPWKGDALPPSLALSRSQEPIYSEEASGPRSPLDMVSSRSSDAARPVGQVDRHIQLLVHGVGQAGPEITDELVRVLCRRLDEATLDVITVMLVRNCKLTPADVEFIQPPGSLPSEVLHLALPTSCRPWLPALAWYLRQNLLIFLHSPKYTDSNSRNHFQHPLPPQGGLPDLDIYLYNKPGGQGTGGKGVACITLAFVDEGGAPLSLALWPPSSPGPPDPLREEEFEQLTQVIRCPVVVDSSSAQNGAPRLRLDVWEKGNISIVQLEEKLRGAARQALADAIIELQLLPASLCTEDTPTGSLRNGSLETKSSAGRASTFPPAPVPGEPVTPPSKAGRRSFWDMLSKTECGDLGSPKTTDDIVLDRPEDTRGRRRHKTESVRTPGGAERAPGSDSGAQRQKRRTTQLEEGEVGTLHPVFARVAQRWMEFMVQIGCASVSRSSAHMVSRFLLPSILSEFTALVTSMAGDTSVRIFEQHLGSEPEIFGPCSPGQLGPSPRPAAERHLLLLGRNFLQWRRPTQQAAKAMQRFEPGGDGSSGRNAPRQRLLLLEVVDKKLQLLTYNWAPDLGAALGRALVRLVQWQNARAHLIFCLLSQKLGLFHHYGQLDFPVRDEKEPNPFLLPTMEVETLIRSASPPLSREQGRLSGSSRGGGPLPLDTFPFDEALRDITAARPSSVLGPVPRPPDPVTYHGQQFLEIKMAERRELERQMKMENLFVTWQQRSTPATMPISAGELETLKQSSRLVHYCATAMLFDPAAWLHGPPETSGPPDGQRRHRPESGSGSREAPTSCESLDVSPPGAREEPWLKELSLAFLQQYVQYLQSIGFVLVPLRPPSPARSTSRPRAMAILGTEGRGSFSCPKTKTDGSPKSTSSPVTTYHLQRALPGGIILMELAFQGCYFCVKQFALECSRIPMGQAVNSQLSMLFTEECDKVRDLMHVHSFSYDFHLRLVHQHVLGAHLVLRHGYHLTTFLRHFLAHHPDGPHFGRNHIYQGTLELPTPLIAAHQLYNYVADHASSYHMKPLRMARPGGPEHNEYALVSAWHSSGSYLDSEGLRHQDDFDVSLLVCHCAAPFEEQGEAERHVLRLQFFVVLTSQRELFPRLTADMRRFRKPPRLPPEPEAPGSSAGSPGEASGLILAPGPAPLFPPLAAEVGMARARLAQLVRLAGGHCRRDTLWKRLFLLEPPGPDRLRLGGRLALAELEELLEAVHAKSIGDIDPQLDCFLSMTVSWYQSLIKVLLSRFPQSCRHFQSPDLGTQYLVVLNQKFTDCFVLVFLDSHLGKTSLTVVFREPFPVQPQDSESPPAQLVSTYHHLESVINTACFTLWTRLL

SEQ ID NO: 3467 - protein, 1531 aa, Homo sapiens
MPSDFISLLSADLDLESPKSLYSRESVYDLLPKELQLPPSRETSVASMSQTSGGEAGSPPPAVVAADASSAPSSSSMGGACSSFTTSSSPTIYSTSVTDSKAMQVESCSSAVGVSNRGVSEKQLTSNTVQQHPSTPKRHTVLYISPPPEDLLDNSRMSCQDEGCGLESEQSCSMWMEDSPSNFSNMSTSSYNDNTEVPRKSRKRNPKQRPGVKRRDCEESNMDIFDADSAKAPHYVLSQLTTDNKGNSKAGNGTLENQKGTGVKKSPMLCGQYPVKSEGKELKIVVQPETQHRARYLTEGSRGSVKDRTQQGFPTVKLEGHNEPVVLQVFVGNDSGRVKPHGFYQACRVTGRNTTPCKEVDIEGTTVIEVGLDPSNNMTLAVDCVGILKLRNADVEARIGIAGSKKKSTRARLVFRVNIMRKDGSTLTLQTPSSPILCTQPAGVPEILKKSLHSCSVKGEEEVFLIGKNFLKGTKVIFQENVSDENSWKSEAEIDMELFHQNHLIVKVPPYHDQHITLPVSVGIYVVTNAGRSHDVQPFTYTPDPAAAGALNVNVKKEISSPARPCSFEEAMKAMKTTGCNLDKVNIIPNALMTPLIPSSMIKSEDVTPMEVTAEKRSSTIFKTTKSVGSTQQTLENISNIAGNGSFSSPSSSHLPSENEKQQQIQPKAYNPETLTTIQTQDISQPGTFPAVSASSQLPNSDALLQQATQFQTRETQSREILQSDGTVVNLSQLTEASQQQQQSPLQEQAQTLQQQISSNIFPSPNSVSQLQNTIQQLQAGSFTGSTASGSSGSVDLVQQVLEAQQQLSSVLFSAPDGNENVQEQLSADIFQQVSQIQSGVSPGMFSSTEPTVHTRPDNLLPGRAESVHPQSENTLSNQQQQQQQQQQVMESSAAMVMEMQQSICQAAAQIQSELFPSTASANGNLQQSPVYQQTSHMMSALSTNEDMQMQCELFSSPPAVSGNETSTTTTQQVATPGTTMFQTSSSGDGEETGTQAKQIQNSVFQTMVQMQHSGDNQPQVNLFSSTKSMMSVQNSGTQQQGNGLFQQGNEMMSLQSGNFLQQSSHSQAQLFHPQNPIADAQNLSQETQGSLFHSPNPIVHSQTSTTSSEQMQPPMFHSQSTIAVLQGSSVPQDQQSTNIFLSQSPMNNLQTNTVAQEAFFAAPNSISPLQSTSNSEQQAAFQQQAPISHIQTPMLSQEQAQPPQQGLFQPQVALGSLPPNPMPQSQQGTMFQSQHSIVAMQSNSPSQEQQQQQQQQQQQQQQQQQSILFSNQNTMATMASPKQPPPNMIFNPNQNPMANQEQQNQSIFHQQSNMAPMNQEQQPMQFQSQSTVSSLQNPGPTQSESSQTPLFHSSPQIQLVQGSPSSQEQQVTLFLSPASMSALQTSINQQDMQQSPLYSPQNNMPGIQGATSSPQPQATLFHNTAGGTMNQLQNSPGSSQQTSGMFLFGIQNNCSQLLTSGPATLPDQLMAISQPGQPQNEGQPPVTTLLSQQMPENSPLASSINTNQNIEKIDLLVSLQNQGNNLTGSF

SEQ ID NO: 3468 - protein, 1484 aa, Homo sapiens
MSQTSGGEAGSPPPAVVAADASSAPSSSSMGGACSSFTTSSSPTIYSTSVTDSKAMQVESCSSAVGVSNRGVSEKQLTSNTVQQHPSTPKRHTVLYISPPPEDLLDNSRMSCQDEGCGLESEQSCSMWMEDSPSNFSNMSTSSYNDNTEVPRKSRKRNPKQRPGVKRRDCEESNMDIFDADSAKAPHYVLSQLTTDNKGNSKAGNGTLENQKGTGVKKSPMLCGQYPVKSEGKELKIVVQPETQHRARYLTEGSRGSVKDRTQQGFPTVKLEGHNEPVVLQVFVGNDSGRVKPHGFYQACRVTGRNTTPCKEVDIEGTTVIEVGLDPSNNMTLAVDCVGILKLRNADVEARIGIAGSKKKSTRARLVFRVNIMRKDGSTLTLQTPSSPILCTQPAGVPEILKKSLHSCSVKGEEEVFLIGKNFLKGTKVIFQENVSDENSWKSEAEIDMELFHQNHLIVKVPPYHDQHITLPVSVGIYVVTNAGRSHDVQPFTYTPDPAAAGALNVNVKKEISSPARPCSFEEAMKAMKTTGCNLDKVNIIPNALMTPLIPSSMIKSEDVTPMEVTAEKRSSTIFKTTKSVGSTQQTLENISNIAGNGSFSSPSSSHLPSENEKQQQIQPKAYNPETLTTIQTQDISQPGTFPAVSASSQLPNSDALLQQATQFQTRETQSREILQSDGTVVNLSQLTEASQQQQQSPLQEQAQTLQQQISSNIFPSPNSVSQLQNTIQQLQAGSFTGSTASGSSGSVDLVQQVLEAQQQLSSVLFSAPDGNENVQEQLSADIFQQVSQIQSGVSPGMFSSTEPTVHTRPDNLLPGRAESVHPQSENTLSNQQQQQQQQQQVMESSAAMVMEMQQSICQAAAQIQSELFPSTASANGNLQQSPVYQQTSHMMSALSTNEDMQMQCELFSSPPAVSGNETSTTTTQQVATPGTTMFQTSSSGDGEETGTQAKQIQNSVFQTMVQMQHSGDNQPQVNLFSSTKSMMSVQNSGTQQQGNGLFQQGNEMMSLQSGNFLQQSSHSQAQLFHPQNPIADAQNLSQETQGSLFHSPNPIVHSQTSTTSSEQMQPPMFHSQSTIAVLQGSSVPQDQQSTNIFLSQSPMNNLQTNTVAQEAFFAAPNSISPLQSTSNSEQQAAFQQQAPISHIQTPMLSQEQAQPPQQGLFQPQVALGSLPPNPMPQSQQGTMFQSQHSIVAMQSNSPSQEQQQQQQQQQQQQQQQQQSILFSNQNTMATMASPKQPPPNMIFNPNQNPMANQEQQNQSIFHQQSNMAPMNQEQQPMQFQSQSTVSSLQNPGPTQSESSQTPLFHSSPQIQLVQGSPSSQEQQVTLFLSPASMSALQTSINQQDMQQSPLYSPQNNMPGIQGATSSPQPQATLFHNTAGGTMNQLQNSPGSSQQTSGMFLFGIQNNCSQLLTSGPATLPDQLMAISQPGQPQNEGQPPVTTLLSQQMPENSPLASSINTNQNIEKIDLLVSLQNQGNNLTGSF

SEQ ID NO: 3469 - protein, 1455 aa, Homo sapiens
MGGACSSFTTSSSPTIYSTSVTDSKAMQVESCSSAVGVSNRGVSEKQLTSNTVQQHPSTPKRHTVLYISPPPEDLLDNSRMSCQDEGCGLESEQSCSMWMEDSPSNFSNMSTSSYNDNTEVPRKSRKRNPKQRPGVKRRDCEESNMDIFDADSAKAPHYVLSQLTTDNKGNSKAGNGTLENQKGTGVKKSPMLCGQYPVKSEGKELKIVVQPETQHRARYLTEGSRGSVKDRTQQGFPTVKLEGHNEPVVLQVFVGNDSGRVKPHGFYQACRVTGRNTTPCKEVDIEGTTVIEVGLDPSNNMTLAVDCVGILKLRNADVEARIGIAGSKKKSTRARLVFRVNIMRKDGSTLTLQTPSSPILCTQPAGVPEILKKSLHSCSVKGEEEVFLIGKNFLKGTKVIFQENVSDENSWKSEAEIDMELFHQNHLIVKVPPYHDQHITLPVSVGIYVVTNAGRSHDVQPFTYTPDPAAAGALNVNVKKEISSPARPCSFEEAMKAMKTTGCNLDKVNIIPNALMTPLIPSSMIKSEDVTPMEVTAEKRSSTIFKTTKSVGSTQQTLENISNIAGNGSFSSPSSSHLPSENEKQQQIQPKAYNPETLTTIQTQDISQPGTFPAVSASSQLPNSDALLQQATQFQTRETQSREILQSDGTVVNLSQLTEASQQQQQSPLQEQAQTLQQQISSNIFPSPNSVSQLQNTIQQLQAGSFTGSTASGSSGSVDLVQQVLEAQQQLSSVLFSAPDGNENVQEQLSADIFQQVSQIQSGVSPGMFSSTEPTVHTRPDNLLPGRAESVHPQSENTLSNQQQQQQQQQQVMESSAAMVMEMQQSICQAAAQIQSELFPSTASANGNLQQSPVYQQTSHMMSALSTNEDMQMQCELFSSPPAVSGNETSTTTTQQVATPGTTMFQTSSSGDGEETGTQAKQIQNSVFQTMVQMQHSGDNQPQVNLFSSTKSMMSVQNSGTQQQGNGLFQQGNEMMSLQSGNFLQQSSHSQAQLFHPQNPIADAQNLSQETQGSLFHSPNPIVHSQTSTTSSEQMQPPMFHSQSTIAVLQGSSVPQDQQSTNIFLSQSPMNNLQTNTVAQEAFFAAPNSISPLQSTSNSEQQAAFQQQAPISHIQTPMLSQEQAQPPQQGLFQPQVALGSLPPNPMPQSQQGTMFQSQHSIVAMQSNSPSQEQQQQQQQQQQQQQQQQQSILFSNQNTMATMASPKQPPPNMIFNPNQNPMANQEQQNQSIFHQQSNMAPMNQEQQPMQFQSQSTVSSLQNPGPTQSESSQTPLFHSSPQIQLVQGSPSSQEQQVTLFLSPASMSALQTSINQQDMQQSPLYSPQNNMPGIQGATSSPQPQATLFHNTAGGTMNQLQNSPGSSQQTSGMFLFGIQNNCSQLLTSGPATLPDQLMAISQPGQPQNEGQPPVTTLLSQQMPENSPLASSINTNQNIEKIDLLVSLQNQGNNLTGSF

SEQ ID NO: 3470 - protein, 1455 aa, Homo sapiens; identical to SEQ ID NO: 3469

SEQ ID NO: 3471 - protein, 1455 aa, Homo sapiens; identical to SEQ ID NO: 3469

SEQ ID NO: 3472 - protein, 495 aa, Homo sapiens
MAESAPARHRRKRRSTPLTSSTLPSQATEKSSYFQTTEISLWTVVAAIQAVEKKMESQAARLQSLEGRTGTAEKKLADCEKMAVEFGNQLEGKWAVLGTLLQEYGLLQRRLENVENLLRNRNFWILRLPPGSKGEAPKVSRSLENDGVCFTEQEWENLEDWQKELYRNVMESNYETLVSLKVLGQTEGEAELGTEMLGDLEEEGPGGAHPAGGVMIKQELQYTQEGPADLPGEFSCIAEEQAFLSPEQTELWGGQGSSVLLETGPGDSTLEEPVGSRVPSSSRTVGCPKQKSHRQVQLDQECGQGLKLKKDTSRPYECSECEITFRYKQQLATHLRSHSGWGSCTPEEPEESLRPRPRLKPQTKKAKLHQCDVCLRSFSCKVSLVTHQRCHLQEGPSAGQHVQERFSPNSLVALPGHIPWRKSRSSLICGYCGKSFSHPSDLVRHQRIHTGERPYSCTECEKSFVQKQHLLQHQKIHQRERGGLALEPGRPNGLL

SEQ ID NO: 3473 - protein, 519 aa, Homo sapiens
MAAEAADLGLGAAVPVELRRERRMVCVEYPGVVRDVAKMLPTLGGEEGVSRIYADPTKRLELYFRPKDPYCHPVCANRFSTSSLLLRIRKRTRRQKGVLGTEAHSEVTFDMEILGIISTIYKFQGMSDFQYLAVHTEAGGKHTSMYDKVLMLRPEKEAFFHQELPLYIPPPIFSRLDAPVDYFYRPETQHREGYNNPPISGENLIGLSRARRPHNAIFVNFEDEEVPKQPLEAAAQTWRRVCTNPVDRKVEEELRKLFDIRPIWSRNAVKANISVHPDKLKVLLPFIAYYMITGPWRSLWIRFGYDPRKNPDAKIYQVLDFRIRCGMKHGYAPSDLPVKAKRSTYNYSLPITVKKTSSQLVTMHDLKQGLGRSGTSGARKPASSKYKLKDSVYIFREGALPPYRQMFYQLCDLNVEELQKIIHRNDGAENSCTERDGWCLPKTSDELRDTMSLMIRQTIRSKRPALFSSSAKADGGKEQLTYESGEDEEDEEEEEEEEEDFKPSDGSENEMETEILDYV

SEQ ID NO: 3474 - protein, 123 aa, Homo sapiens
MLFYLSGTYYALYFLATLLMITYKSQVFSYPHRYLVLDLALLFLMGILEAVRLYLGTRGNLTEAERPLAASLALTAGTALLSAHFLLWQALVLWADWALSATLLALHGLEAVLQVVAIAAFTR

SEQ ID NO: 3475 - protein, 393 aa, Homo sapiens
MDAATLTYDTLRFAEFEDFPETSEPVWILGRKYSIFTEKDEILSDVASRLWFTYRKNFPAIGGTGPTSDTGWGCMLRCGQMIFAQALVCRHLGRDWRWTQRKRQPDSYFSVLNAFIDRKDSYYSIHQIAQMGVGEGKSIGQWYGPNTVAQVLKKLAVFDTWSSLAVHIAMDNTVVMEEIRRLCRTSVPCAGATAFPADSDRHCNGFPAGAEVTNRPSPWRPLVLLIPLRLGLTDINEAYVETLKHCFMMPQSLGVIGGKPNSAHYFIGYVGEELIYLDPHTTQPAVEPTDGCFIPDESFHCQHPPCRMSIAELDPSIAVGFFCKTEDDFNDWCQQVKKLSLLGGALPMFELVELQPSHLACPDVLNLSLDSSDVERLERFFDSEDEDFEILSL

SEQ ID NO: 3476 - protein, 380 aa, Homo sapiens
MDAATLTYDTLRFAEFEDFPETSEPVWILGRKYSIFTEKDEILSDVASRLWFTYRKNFPAIGGTGPTSDTGWGCMLRCGQMIFAQALVCRHLGRDWRWTQRKRQPDSYFSVLNAFIDRKDSYYSIHQIAQMGVGEGKSIGQWYGPNTVAQVLKKLAVFDTWSSLAVHIAMDNTVVMEEIRRLCRTSVPCAGATAFPADSDRHCNGFPAGAEVTNRPSPWRPLVLLIPLRLGLTDINEAYVETLKHCFMMPQSLGVIGGKPNSAHYFIGYVGEELIYLDPHTTQPAVEPTDGCFIPDESFHCQHPPCRMSIAELDPSIAVGFFCKTEDDFNDWCQQVKKLSLLGGALPMFELVELQPSHLACPDVLNLSLGESCQVQILLM

SEQ ID NO: 3477 - protein, 503 aa, Homo sapiens
MAGLSDLELRRELQALGFQPGPITDTTRDVYRNKLRRLRGEARLRDEERLREEARPRGEERLREEARLREDAPLRARPAAASPRAEPWLSQPASGSAYATPGAYGDIRPSAASWVGSRGLAYPARPAQLRRRASVRGSSEEDEDARTPDRATQGPGLAARRWWAASPAPARLPSSLLGPDPRPGLRATRAGPAGAARARPEVGRRLERWLSRLLLWASLGLLLVFLGILWVKMGKPSAPQEAEDNMKLLPVDCERKTDEFCQAKQKAALLELLHELYNFLAIQAGNFECGNPENLKSKCIPVMEAQEYIANVTSSSSAKFEAALTWILSSNKDVGIWLKGEDQSELVTTVDKVVCLESAHPRMGVGCRLSRALLTAVTNVLIFFWCLAFLWGLLILLKYRWRKLEEEEQAMYEMVKKIIDVVQDHYVDWEQDMERYPYVGILHVRDSLIPPQSRRRMKRVWDRAVEFLASNESRIQTESHRVAGEDMLVWRWTKPSSFSDSER

SEQ ID NO: 3478 - protein, 553 aa, Homo sapiens
MAFEDVAVYFSQEEWGLLDTAQRALYRRVMLDNFALVASLGLSTSRPRVVIQLERGEEPWVPSGTDTTLSRTTYRRRNPGSWSLTEDRDVSGEWPRAFPDTPPGMTTSVFPVAGACHSVKSLQRQRGASPSRERKPTGVSVIYWERLLLGSGSGQASVSLRLTSPLRPPEGVRLREKTLTEHALLGRQPRTPERQKPCAQEVPGRTFGSAQDLEAAGGRGHHRMGAVWQEPHRLLGGQEPSTWDELGEALHAGEKSFECRACSKVFVKSSDLLKHLRTHTGERPYECAQCGKAFSQTSHLTQHQRIHSGETPYACPVCGKAFRHSSSLVRHQRIHTAEKSFRCSECGKAFSHGSNLSQHRKIHAGGRPYACAQCGRRFCRNSHLIQHERTHTGEKPFVCALCGAAFSQGSSLFKHQRVHTGEKPFACPQCGRAFSHSSNLTQHQLLHTGERPFRCVDCGKAFAKGAVLLSHRRIHTGEKPFVCTQCGRAFRERPALFHHQRIHTGEKTVRRSRASLHPQARSVAGASSEGAPAKETEPTPASGPAAVSQPAEV

SEQ ID NO: 3479 - protein, 217 aa, Homo sapiens
MSGGLAPSKSTVYVSNLPFSLTNNDLYRIFSKYGKVVKVTIMKDKDTRKSKGVAFILFLDKDSAQNCTRAINNKQLFGRVIKASIAIDNGRAAEFIRRRNYFDKSKCYECGESGHLSYACPKNMLGEREPPKKKEKKKKKKAPEPEEEIEEVEESEDEGEDPALDSLSQAIAFQQAKIEEEQKKWKPSSGVPSTSDDSRRPRIKKSTYFSDEEELSD

SEQ ID NO: 3480 - protein, 103 aa, Homo sapiens
MMGSKMASASRVVQVVKPHTPLIRFPDRRDNPKPNVSEALRSAGLPSHSSVISQHSKGSKSPDLLMYQGPPDTAEIIKTLPQKYRRKLVSQEEMEFIQRGGPE

SEQ ID NO: 3481 - protein, 514 aa, Homo sapiens
MDLANHGLILLQQLNAQREFGFLCDCTVAIGDVYFKAHKSVLASFSNYFKMLFVHQTSECVRLKPTDIQPDIFSYLLHLMYTGKMAPQLIDPVRLEQGIKFLHAYPLIQEASLASQGAFSHPDQVFPLASSLYGIQIADHQLRQATKIASAPEKLGRDPRPQTSRISQEQVPEASQLSQLTSNLAQVNRTNMTPSDPLQTSLSPELVSTPVPPPPPGEETNLEASSSDEQPASLTIAHVKPSIMKRNGSFPKYYACHLCGRRFTLRSSLREHLQIHTGVPFTSSQQGESRVPLTLCSNAADLGKDAMEVPEAGMISDSELQHISDSPIIDGQQQSETPPPSDIADIDNLEQADQEREVKRRKYECTICGRKFIQKSHWREHMYIHTGKPFKCSTCDKSFCRANQAARHVCLNQSIDTYTMVDKQTLELCTFEEGSQMDNMLVQTNKPYKCNLCDKTFSTPNEVVKHSCQNQNSDVFALDEGRSILLGSGDSEVTEPDHPVLASIKKEQETVLLD

SEQ ID NO: 3482 - protein, 317 aa, Homo sapiens
MSHGPKQPGAAAAPAGGKAPGQHGGFVVTVKQERGEGPRAGEKGSHEEEPVKKRGWPKGKKRKKILPNGPKAPVTGYVRFLNERREQIRTRHPDLPFPEITKMLGAEWSKLQPTEKQRYLDEAEREKQQYMKELRAYQQSEAYKMCTEKIQEKKIKKEDSSSGLMNTLLNGHKGGDCDGFSTFDVPIFTEEFLDQNKAREAELRRLRKMNVAFEEQNAVLQRHTQSMSSARERLEQELALEERRTLALQQQLQAVRQALTASFASLPVPGTGETPTLGTLDFYMARLHGAIERDPAQHEKLIVRIKEILAQVASEHL

SEQ ID NO: 3483 - protein, 222 aa, Homo sapiens
MAARPKLHYPNGRGRMESVRWVLAAAGVEFDEEFLETKEQLYKLQDGNHLLFQQVPMVEIDGMKLVQTRSILHYIADKHNLFGKNLKERTLIDMYVEGTLDLLELLIMHPFLKPDDQQKEVVNMAQKAIIRYFPVFEKILRGHGQSFLVGNQLSLADVILLQTILALEEKIPNILSAFPFLQEYTVKLSNIPTIKRFLEPGSKKKPPPDEIYVRTVYNIFRP

SEQ ID NO: 3484 - protein, 406 aa, Homo sapiens
MDGSHSAALKLQQLPPTSSSSAVSEASFSYKENLIGALLAIFGHLVVSIALNLQKYCHIRLAGSKDPRAYFKTKTWWLGLFLMLLGELGVFASYAFAPLSLIVPLSAVSVIASAIIGIIFIKEKWKPKDFLRRYVLSFVGCGLAVVGTYLLVTFAPNSHEKMTGENVTRHLVSWPFLLYMLVEIILFCLLLYFYKEKNANNIVVILLLVALLGSMTVVTVKAVAGMLVLSIQGNLQLDYPIFYVMFVCMVATAVYQAAFLSQASQMYDSSLIASVGYILSTTIAITAGAIFYLDFIGEDVLHICMFALGCLIAFLGVFLITRNRKKPIPFEPYISMDAMPGMQNMHDKGMTVQPELKASFSYGALENNDNISEIYAPATLPVMQEEHGSRSASGVPYRVLEHTKKE

SEQ ID NO: 3485 - protein, 428 aa, Homo sapiens
MYSSPLCLTQDEFHPFIEALLPHVRAFAYTWFNLQARKRKYFKKHEKRMSKDEERAVKDELLGEKPEVKQKWASRLLAKLRKDIRPECREDFVLSITGKKAPGCVLSNPDQKGKMRRIDCLRQADKVWRLDLVMVILFKGIPLESTDGERLVKAAQCGHPVLCVQPHHIGVAVKELDLYLAYFVRERDAEQSGSPRTGMGSDQEDSKPITLDTTDFQESFVTSGVFSVTELIQVSRTPVVTGTGPNFSLGELQGHLAYDLNPASTGLRRTLPSTSSSGSKRHKSGSMEEDVDTSPGGDYYTSPSSPTSSSRNWTEDMEGGISSPVKKTEMDKSPFNSPSPQDSPRLSSFTQHHRPVIAVHSGIARSPHPSSALHFPTTSILPQTASTYFPHTAIRYPPHLNPQDPLKDLVSLACDPASQQPGPSWYLG

SEQ ID NO: 3486 - protein, 499 aa, Homo sapiens
MDEFHPFIEALLPHVRAFAYTWFNLQARKRKYFKKHEKRMSKDEERAVKDELLGEKPEVKQKWASRLLAKLRKDIRPECREDFVLSITGKKAPGCVLSNPDQKGKMRRIDCLRQADKVWRLDLVMVILFKGIPLESTDGERLVKAAQCGHPVLCVQPHHIGVAVKELDLYLAYFVRERDAEQSGSPRTGMGSDQEDSKPITLDTTDFQESFVTSGVFSVTELIQVSRTPVVTGTGPNFSLGELQGHLAYDLNPASTGLRRTLPSTSSSGSKRHKSGSMEEDVDTSPGGDYYTSPSSPTSSSRNWTEDMEGGISSPVKKTEMDKSPFNSPSPQDSPRLSSFTQHHRPVIAVHSGIARSPHPSSALHFPTTSILPQTASTYFPHTAIRYPPHLNPQDPLKDLVSLACDPASQQPGPLNGSGQLKMPSHCLSAQMLAPPPPGLPRLALPPATKPATTSEGGATSPTSPSYSPPDTSPANRSFVGLGPRDPAGIYQAQSWYLG

SEQ ID NO: 3487 - protein, 614 aa, Homo sapiens
MNASGSGYPLASLYVGDLHPDVTEAMLYEKFSPAGPILSIRVCRDVATRRSLGYAYINFQQPADAERALDTMNFEMLKGQPIRIMWSQRDPGLRKSGVGNIFIKNLEDSIDNKALYDTFSTFGNILSCKVACDEHGSRGFGFVHFETHEAAQQAINTMNGMLLNDRKVFVGHFKSRREREAELGARALEFTNIYVKNLPVDVDEQGLQDLFSQFGKMLSVKVMRDNSGHSRCFGFVNFEKHEEAQKAVVHMNGKEVSGRLLYAGRAQKRVERQNELKRRFEQMKQDRLRRYQGVNLYVKNLDDSIDDDKLRKEFSPYGVITSAKVMTEGGHSKGFGFVCFSSPEEATKAVTEMNGRIVGTKPLYVALAQRKEERKAILTNQYMQRLSTMRTLSNPLLGSFQQPSSYFLPAMPQPPAQAAYYGCGPVTPTQPAPRWTSQPPRPSCASMVRPPVVPRRPPAHISSVRQASTQVPRTVPHTQRVANIGTQTTGPSGVGCCTPGRPLLPCKCSSAAHSTYRVQEPAVHIPGQEPLTASMLAAAPLHEQKQMIGERLYPLIHDVHTQLAGKITGMLLEIDNSELLLMLESPESLHAKIDEAVAVLQAHQAMEQPKAYMH

SEQ ID NO: 3488 - protein, 581 aa, Homo sapiens
MAVAGAVSGEPLVHWCTQQLRKTFGLDVSEEIIQYVLSIESAEEIREYVTDLLQGNEGKKGQFIEELITKWQKNDQELISDPLQQCFKKDEILDGQKSGDHLKRGRKKGRNRQEVPAFTEPDTTAEVKTPFDLAKAQENSNSVKKKTKFVNLYTREGQDRLAVLLPGRHPCDCLGQKHKLINNCLICGRIVCEQEGSGPCLFCGTLVCTHEEQDILQRDSNKSQKLLKKLMSGVENSGKVDISTKDLLPHQELRIKSGLEKAIKHKDKLLEFDRTSIRRTQVIDDESDYFASDSNQWLSKLERETLQKREEELRELRHASRLSKKVTIDFAGRKILEEENSLAEYHSRLDETIQAIANGTLNQPLTKLDRSSEEPLGVLVNPNMYQSPPQWVDHTGAASQKKAFRSSGFGLEFNSFQHQLRIQDQEFQEGFDGGWCLSVHQPWASLLVRGIKRVEGRSWYTPHRGRLWIAATAKKPSPQEVSELQATYRLLRGKDVEFPNDYPSGCLLGCVDLIDCLSQKQFKEQFPDISQESDSPFVFICKNPQEMVVKFPIKGNPKIWKLDSKIHQGAKKGLMKQNKAV

SEQ ID NO: 3489 - protein, 1162 aa, Homo sapiens
MAHAGGGSGGSGAGGPAGRGLSGARWGRSGSAGHEKLPVHVEDALTYLDQVKIRFGSDPATYNGFLEIMKEFKSQSIDTPGVIRRVSQLFHEHPDLIVGFNAFLPLGYRIDIPKNGKLNIQSPLTSQENSHNHGDGAEDFKQQVPYKEDKPQVPLESDSVEFNNAISYVNKIKTRFLDHPEIYRSFLEILHTYQKEQLNTRGRPFRGMSEEEVFTEVANLFRGQEDLLSEFGQFLPEAKRSLFTGNGPCEMHSVQKNEHDKTPEHSRKRSRPSLLRPVSAPAKKKMKLRGTKDLSIAAVGKYGTLQEFSFFDKVRRVLKSQEVYENFLRCIALFNQELVSGSELLQLVSPFLGKFPELFAQFKSFLGVKELSFAPPMSDRSGDGISREIDYASCKRIGSSYRALPKTYQQPKCSGRTAICKELDHWTLLQGSWTDDYCMSKFKNTCWIPGYSAGVLNDTWVSFPSWSEDSTFVSSKKTPYEEQLHRCEDERFELDVVLETNLATIRVLESVQKKLSRMAPEDQEKFRLDDSLGGTSEVIQRRAIYRIYGDKAPEIIESLKKNPVTAVPVVLKRLKAKEEEWREAQQGFNKIWREQYEKAYLKSLDHQAVNFKQNDTKALRSKSLLNEIESVYDEHQEQHSEGRSAPSSEPHLIFVYEDRQILEDAAALISYYVKRQPAIQKEDQGTIHQLLHQFVPSLFFSQQLDLGASEESADEDRDSPQGQTTDPSERKKPAPGPHSSPPEEKGAFGDAPATEQPPLPPPAPHKPLDDVYSLFFANNNWYFFLRLHQTLCSRLLKIYRQAQKQLLEYRTEKEREKLLCEGRREKGSDPAMELRLKQPSEVELEEYYPAFLDMVRSLLEGSIDPTQYEDTLREMFTIHAYVGFTMDKLVQNIARQLHHLVSDDVCLKVVELYLNEKKRGAAGGNLSSRCVRAARETSYQWKAERCMADENCFKVMFLQRKGQVIMTIELLDTEEAQTEDPVEVQHLARYVEQYVGTEGASSSPTEGFLLKPVFLQRNLKKFRRRWQSEQARALRGEARSSWKRLVGVESACDVDCRFKLSTHKMVFIVNSEDYMYRRGTLCRAKQVQPLVLLRHHQHFEEWHSRWLEDNVTVEAASLVQDWLMGEEDEDMVPCKTLCETVHVHGLPVTRYRVQYSRRPASP

SEQ ID NO: 3490 - protein, 399 aa, Homo sapiens
MRPERPRPRGSAPGPMETPPWDPARNDSLPPTLTPAVPPYVKLGLTVVYTVFYALLFVFIYVQLWLVLRYRHKRLSYQSVFLFLCLFWASLRTVLFSFYFKDFVAANSLSPFVFWLLYCFPVCLQFFTLTLMNLYFTQVIFKAKSKYSPELLKYRLPLYLASLFISLVFLLVNLTCAVLVKTGNWERKVIVSVRVAINDTLFVLCAVSLSICLYKISKMSLANIYLESKGSSVCQVTAIGVTVILLYTSRACYNLFILSFSQNKSVHSFDYDWYNVSDQADLKNQLGDAGYVLFGVVLFVWELLPTTLVVYFFRVRNPTKDLTNPGMVPSHGFSPRSYFFDNPRRYDSDDDLAWNIAPQGLQGGFAPDYYDWGQQTNSFLAQAGTLQDSTLDPDKPSLG

SEQ ID NO: 3491 - protein, 415 aa, Homo sapiens
MAPVSGSRSPDREASGSGGRRRSSSKSPKPSKSARSPRGRRSRSHSCSRSGDRNGLAHQLGGLSQGSRNQSYRSRSRSRSRERPSAPRGIPFASASSSVYYGSYSRPYGSDKPWPSLLDKEREESLRQKRLSERERIGELGAPEVWGLSPKNPEPDSDEHTPVEDEEPKKSTTSASTSEEEKKKKSSRSKERSKKRRKKKSSKRKHKKYSEDSDSDSDSETDSSDEDNKRRAKKAKKKEKKKKHRSKKYKKKRSKKSRKESSDSSSKESQEEFLENPWKDRTKAEEPSDLIGPEAPKTLTSQDDKPLNYGHALLPGEGAAMAEYVKAGKRIPRRGEIGLTSEEIASFECSGYVMSGSRHRRMEAVRLRKENQIYSADEKRALASFNQEERRKRENKILASFREMVYRKTKGKDDK

SEQ ID NO: 3492 - protein, 263 aa, Homo sapiens
MASNDYTQQATQSYGAYPTQPGQGYSQQSSQPYGQQSYSGYSQSTDTSGYGQSSYSSYGQSQNTGYGTQSTPQGYGSTGGYGSSQSSQSSYGQQSSYPGYGQQPAPSSTSGSYGSSSQSSSYGQPQSGSYSQQPSYGGQQQSYGQQQSYNPPQGYGQQNQYNSSSGGGGGGGGGGNYGQDQSSMSSGGGSGGGYGNQDQSGGGGSGGYGQQDRGGRGRGGSGGGGGGGGGGYNRSSGGYEPRGRGGGRGGRGGMGPSGPRITS

SEQ ID NO: 3493 - protein, 526 aa, Homo sapiens
MASNDYTQQATQSYGAYPTQPGQGYSQQSSQPYGQQSYSGYSQSTDTSGYGQSSYSSYGQSQNTGYGTQSTPQGYGSTGGYGSSQSSQSSYGQQSSYPGYGQQPAPSSTSGSYGSSSQSSSYGQPQSGSYSQQPSYGGQQQSYGQQQSYNPPQGYGQQNQYNSSSGGGGGGGGGGNYGQDQSSMSSGGGSGGGYGNQDQSGGGGSGGYGQQDRGGRGRGGSGGGGGGGGGGYNRSSGGYEPRGRGGGRGGRGGMGGSDRGGFNKFGGPRDQGSRHDSEQDNSDNNTIFVQGLGENVTIESVADYFKQIGIIKTNKKTGQPMINLYTDRETGKLKGEATVSFDDPPSAKAAIDWFDGKEFSGNPIKVSFATRRADFNRGGGNGRGGRGRGGPMGRGGYGGGGSGGGGRGGFPSGGGGGGGQQRAGDWKCPNPTCENMNFSWRNECNQCKAPKPDGPGGGPGGSHMGGNYGDDRRGGRGGYDRGGYRGRGGDRGGFRGGRGGGDRGGFGPGKMDSRGEHRQDRRERPY

SEQ ID NO: 3494 - protein, 126 aa, Homo sapiens
MAPGEVTITVRLIRSFEHRNFKPVVYHGVNLDQTVKEFIVFLKQDVPLRTNLPPPFRNYKYDALKIIHQAHKSKTNELVLSLEDDERLLLKEDSTLKAAGIASETEIAFFCEEDYRNYKANPISSW

SEQ ID NO: 3495 - protein, 661 aa, Homo sapiens
MAFDVSCFFWVVLFSAGCKVITSWDQMCIEKEANKTYNCENLGLSEIPDTLPNTTEFLEFSFNFLPTIHNRTFSRLMNLTFLDLTRCQINWIHEDTFQSHHQLSTLVLTGNPLIFMAETSLNGPKSLKHLFLIQTGISNLEFIPVHNLENLESLYLGSNHISSIKFPKDFPARNLKVLDFQNNAIHYISREDMRSLEQAINLSLNFNGNNVKGIELGAFDSTVFQSLNFGGTPNLSVIFNGLQNSTTQSLWLGTFEDIDDEDISSAMLKGLCEMSVESLNLQEHRFSDISSTTFQCFTQLQELDLTATHLKGLPSGMKGLNLLKKLVLSVNHFDQLCQISAANFPSLTHLYIRGNVKKLHLGVGCLEKLGNLQTLDLSHNDIEASDCCSLQLKNLSHLQTLNLSHNEPLGLQSQAFKECPQLELLDLAFTRLHINAPQSPFQNLHFLQVLNLTYCFLDTSNQHLLAGLPVLRHLNLKGNHFQDGTITKTNLLQTVGSLEVLILSSCGLLSIDQQAFHSLGKMSHVDLSHNSLTCDSIDSLSHLKGIYLNLAANSINIISPRLLPILSQQSTINLSHNPLDCTCSNIHFLTWYKENLHKLEGSEETTCANPPSLRGVKLSDVKLSCGITAIGIFFLIVFLLLLAILLFFAVKYLLRWKYQHI

SEQ ID NO: 3496 - protein, 388 aa, Homo sapiens
MSDEASAITSYEKFLTPEEPFPLLGPPRGVGTCPSEEPGCLDISDFGCQLSSCHRTDPLHRFHTNRWNLTSCGTSVASSEGSEELFSSVSVGDQDDCYSLLDDQDFTSFDLFPEGSVCSDVSSSISTYWDWSDSEFEWQLPGSDIASGSDVLSDVIPSIPSSPCLLPKKKNKHRNLDELPWSAMTNDEQVEYIEYLSRKVSTEMGLREQLDIIKIIDPSAQISPTDSEFIIELNCLTDEKLKQVRNYIKEHSPRQRPAREAWKRSNFSCASTSGVSGASASASSSSASMVSSASSSGSSVGNSASNSSANMSRAHSDSNLSASAAERIRDSKKRSKQRKLQQKAFRKRQLKEQRQARKERLSGLFLNEEVLSLKVTEEDHEADVDVLM

SEQ ID NO: 3497 - protein, 347 aa, Homo sapiens
METPFYGDEALSGLGGGASGSGGTFASPGRLFPGAPPTAAAGSMMKKDALTLSLSEQVAAALKPAPAPASYPPAADGAPSAAPPDGLLASPDLGLLKLASPELERLIIQSNGLVTTTPTSSQFLYPKVAASEEQEFAEGFVKALEDLHKQNQLGAGRAAAAAAAAAGGPSGTATGSAPPGELAPAAAAPEAPVYANLSSYAGGAGGAGGAATVAFAAEPVPFPPPPPPGALGPPRLAALKDEPQTVPDVPSFGESPPLSPIDMDTQERIKAERKRLRNRIAASKCRKRKLERISRLEEKVKTLKSQNTELASTASLLREQVAQLKQKVLSHVNSGCQLLPQHQVPAY

SEQ ID NO: 3498 - protein, 335 aa, Homo sapiens
MKLKLKNVFLAYFLVSIAGLLYALVQLGQPCDCLPPLRAAAEQLRQKDLRISQLQAELRRPPPAPAQPPEPEALPTIYVVTPTYARLVQKAELVRLSQTLSLVPRLHWLLVEDAEGPTPLVSGLLAASGLLFTHLVVLTPKAQRLREGEPGWVHPRGVEQRNKALDWLRGRGGAVGGEKDPPPPGTQGVVYFADDDNTYSRELFEEMRWTRGVSVWPVGLVGGLRFEGPQVQDGRVVGFHTAWEPSRPFPVDMAGFAVALPLLLDKPNAQFDSTAPRGHLESSLLSHLVDPKDLEPRAANCTRVLVWHTRTEKPKMKQEEQLQRQGRGSDPAIEV

SEQ ID NO: 3499 - protein, 247 aa, Homo sapiens
MVDREQLVQKARLAEQAERYDDMAAAMKNVTELNEPLSNEERNLLSVAYKNVVGARRSSWRVISSIEQKTSADGNEKKIEMVRAYREKIEKELEAVCQDVLSLLDNYLIKNCSETQYESKVFYLKMKGDYYRYLAEVATGEKRATVVESSEKAYSEAHEISKEHMQPTHPIRLGLALNYSVFYYEIQNAPEQACHLAKTAFDDAIAELDTLNEDSYKDSTLIMQLLRDNLTLWTSDQQDDDGGEGNN

SEQ ID NO: 3500 - protein, 155 aa, Homo sapiens
MVDLTQVMDDEVFMAFASYATIILSKMMLMSTATAFYRLTRKVFANPEDCVAFGKGENAKKYLRTDDRVERVRRAHLNDLENIIPFLGIGLLYSLSGPDPSTAILHFRLFVGARIYHTIAYLTPLPQPNRALSFFVGYGVTLSMAYRLLKSKLYL

SEQ ID NO: 3501 - protein, 155 aa, Homo sapiens; identical to SEQ ID NO: 3500

SEQ ID NO: 3502 - protein, 155 aa, Homo sapiens; identical to SEQ ID NO: 3500

SEQ ID NO: 3503 - protein, 155 aa, Homo sapiens; identical to SEQ ID NO: 3500

SEQ ID NO: 3504 - protein, 423 aa, Homo sapiens
MAAAAVTGQRPETAAAEEASRPQWAPPDHCQAQAAAGLGDGEDAPVRPLCKPRGICSRAYFLVLMVFVHLYLGNVLALLLFVHYSNGDESSDPGPQHRAQGPGPEPTLGPLTRLEGIKVGHERKVQLVTDRDHFIRTLSLKPLLFEIPGFLTDEECRLIIHLAQMKGLQRSQILPTEEYEEAMSTMQVSQLDLFRLLDQNRDGHLQLREVLAQTRLGNGWWMTPESIQEMYAAIKADPDGDGVLSLQEFSNMDLRDFHKYMRSHKAESSELVRNSHHTWLYQGEGAHHIMRAIRQRVLRLTRLSPEIVELSEPLQVVRYGEGGHYHAHVDSGPVYPETICSHTKLVANESVPFETSCRQVSPNWGLPSILRPGTPMTQAQPCTVGVPLGMGPGDHWVIPVSDALTSPHKLFTQWLERGGYWSS

SEQ ID NO: 3505 - protein, 563 aa, Homo sapiens
MAAAAVTGQRPETAAAEEASRPQWAPPDHCQAQAAAGLGDGEDAPVRPLCKPRGICSRAYFLVLMVFVHLYLGNVLALLLFVHYSNGDESSDPGPQHRAQGPGPEPTLGPLTRLEGIKVGHERKVQLVTDRDHFIRTLSLKPLLFEIPGFLTDEECRLIIHLAQMKGLQRSQILPTEEYEEAMSTMQVSQLDLFRLLDQNRDGHLQLREVLAQTRLGNGWWMTPESIQEMYAAIKADPDGDGVLSLQEFSNMDLRDFHKYMRSHKAESSELVRNSHHTWLYQGEGAHHIMRAIRQRVLRLTRLSPEIVELSEPLQVVRYGEGGHYHAHVDSGPVYPETICSHTKLVANESVPFETSCRQVSPNWGLPSILRPGTPMTQAQPCTVGVPLGMGPGDHWVIPVSPWEHPQLGTCSVPPLPYSYMTVLFYLNNVTGGGETVFPVADNRTYDEMSLIQDDVDLRDTRRHCDKGNLRVKPQQGTAVFWYNYLPDGQGWVGDVDDYSLHGGCLVTRGTKWIANNWINVDPSRARQALFQQEMARLAREGGTDSQPEWALDRAYRDARVEL

SEQ ID NO: 3506 - protein, 502 aa, Homo sapiens [sequence omitted]

SEQ ID NO: 3507 - protein, 179 aa, Homo sapiens
MLSLDFLDDVRRMNKRQLYYQVLNFGMIVSSALMIWKGLMVITGSESPIVVVLSGSMEPAFHRGDLLFLTNRVEDPIRVGEIVVFRIEGREIPIVHRVLKIHEKQNGHIKFLTKGDNNAVDDRGLYKQGQHWLEKKDVVGRARGFVPYIGIVTILMNDYPKFKYAVLFLLGLFVLVHRE

SEQ ID NO: 3508 - protein, 912 aa, Homo sapiens
MEDFARGAASPGPSRPGLVPVSIIGAEDEDFENELETNSEEQNSQFQSLEQVKRRPAHLMALLQHVALQFEPGPLLCCLHADMLGSLGPKEAKKAFLDFYHSFLEKTAVLRVPVPPNVAFELDRTRADLISEDVQRRFVQEVVQSQQVAVGRQLEDFRSKRLMGMTPWEQELAQLEAWVGRDRASYEARERHVAERLLMHLEEMQHTISTDEEKSAAVVNAIGLYMRHLGVRTKSGDKKSGRNFFRKKVMGNRRSDEPAKTKKGLSSILDAARWNRGEPQVPDFRHLKAEVDAEKPGATDRKGGVGMPSRDRNIGAPGQDTPGVSLHPLSLDSPDREPGADAPLELGDSSPQGPMSLESLAPPESTDEGAETESPEPGDEGEPGRSGLELEPEEPPGWRELVPPDTLHSLPKSQVKRQEVISELLVTEAAHVRMLRVLHDLFFQPMAECLFFPLEELQNIFPSLDELIEVHSLFLDRLMKRRQESGYLIEEIGDVLLARFDGAEGSWFQKISSRFCSRQSFALEQLKAKQRKDPRFCAFVQEAESRPRCRRLQLKDMIPTEMQRLTKYPLLLQSIGQNTEEPTEREKVELAAECCREILHHVNQAVRDMEDLLRLKDYQRRLDLSHLRQSSDPMLSEFKNLDITKKKLVHEGPLTWRVTKDKAVEVHVLLLDDLLLLLQRQDERLLLKSHSRTLTPTPDGKTMLRPVLRLTSAMTREVATDHKAFYVLFTWDQEAQIYELVAQTVSERKNWCALITETAGSLKVPAPASRPKPRPSPSSTREPLLSSSENGNGGRETSPADARTERILSDLLPFCRPGPEGQLAATALRKVLSLKQLLFPAEEDNGAGPPRDGDGVPGGGPLSPARTQEIQENLLSLEETMKQLEELEEEFCRLRPLLSQLGGNSVPQPGCT

SEQ ID NO: 3509 - protein, 879 aa, Homo sapiens
MEDFARGAASPGPSRPGLVPVSIIGAEDEDFENELETNSEEQNSQFQSLEQVKRRPAHLMALLQHVALQFEPGPLVLRVPVPPNVAFELDRTRADLISEDVQRRFVQEVVQSQQVAVGRQLEDFRSKRLMGMTPWEQELAQLEAWVGRDRASYEARERHVAERLLMHLEEMQHTISTDEEKSAAVVNAIGLYMRHLGVRTKSGDKKSGRNFFRKKVMGNRRSDEPAKTKKGLSSILDAARWNRGEPQVPDFRHLKAEVDAEKPGATDRKGGVGMPSRDRNIGAPGQDTPGVSLHPLSLDSPDREPGADAPLELGDSSPQGPMSLESLAPPESTDEGAETESPEPGDEGEPGRSGLELEPEEPPGWRELVPPDTLHSLPKSQVKRQEVISELLVTEAAHVRMLRVLHDLFFQPMAECLFFPLEELQNIFPSLDELIEVHSLFLDRLMKRRQESGYLIEEIGDVLLARFDGAEGSWFQKISSRFCSRQSFALEQLKAKQRKDPRFCAFVQEAESRPRCRRLQLKDMIPTEMQRLTKYPLLLQSIGQNTEEPTEREKVELAAECCREILHHVNQAVRDMEDLLRLKDYQRRLDLSHLRQSSDPMLSEFKNLDITKKKLVHEGPLTWRVTKDKAVEVHVLLLDDLLLLLQRQDERLLLKSHSRTLTPTPDGKTMLRPVLRLTSAMTREVATDHKAFYVLFTWDQEAQIYELVAQTVSERKNWCALITETAGSLKVPAPASRPKPRPSPSSTREPLLSSSENGNGGRETSPADARTERILSDLLPFCRPGPEGQLAATALRKVLSLKQLLFPAEEDNGAGPPRDGDGVPGGGPLSPARTQEIQENLLSLEETMKQLEELEEEFCRLRPLLSQLGGNSVPQPGCT

SEQ ID NO: 3510 - protein, 927 aa, Homo sapiens
MASLSTWSSPAEPREMEDFARGAASPGPSRPGLVPVSIIGAEDEDFENELETNSEEQNSQFQSLEQVKRRPAHLMALLQHVALQFEPGPLLCCLHADMLGSLGPKEAKKAFLDFYHSFLEKTAVLRVPVPPNVAFELDRTRADLISEDVQRRFVQEVVQSQQVAVGRQLEDFRSKRLMGMTPWEQELAQLEAWVGRDRASYEARERHVAERLLMHLEEMQHTISTDEEKSAAVVNAIGLYMRHLGVRTKSGDKKSGRNFFRKKVMGNRRSDEPAKTKKGLSSILDAARWNRGEPQVPDFRHLKAEVDAEKPGATDRKGGVGMPSRDRNIGAPGQDTPGVSLHPLSLDSPDREPGADAPLELGDSSPQGPMSLESLAPPESTDEGAETESPEPGDEGEPGRSGLELEPEEPPGWRELVPPDTLHSLPKSQVKRQEVISELLVTEAAHVRMLRVLHDLFFQPMAECLFFPLEELQNIFPSLDELIEVHSLFLDRLMKRRQESGYLIEEIGDVLLARFDGAEGSWFQKISSRFCSRQSFALEQLKAKQRKDPRFCAFVQEAESRPRCRRLQLKDMIPTEMQRLTKYPLLLQSIGQNTEEPTEREKVELAAECCREILHHVNQAVRDMEDLLRLKDYQRRLDLSHLRQSSDPMLSEFKNLDITKKKLVHEGPLTWRVTKDKAVEVHVLLLDDLLLLLQRQDERLLLKSHSRTLTPTPDGKTMLRPVLRLTSAMTREVATDHKAFYVLFTWDQEAQIYELVAQTVSERKNWCALITETAGSLKVPAPASRPKPRPSPSSTREPLLSSSENGNGGRETSPADARTERILSDLLPFCRPGPEGQLAATALRKVLSLKQLLFPAEEDNGAGPPRDGDGVPGGGPLSPARTQEIQENLLSLEETMKQLEELEEEFCRLRPLLSQLGGNSVPQPGCT

SEQ ID NO: 3511 - protein, 390 aa, Homo sapiens
MDFWLWPLYFLPVSGALRILPEVKVEGELGGSVTIKCPLPEMHVRIYLCREMAGSGTCGTVVSTTNFIKAEYKGRVTLKQYPRKNLFLVEVTQLTESDSGVYACGAGMNTDRGKTQKVTLNVHSEYEPSWEEQPMPETPKWFHLPYLFQMPAYASSSKFVTRVTTPAQRGKVPPVHHSSPTTQITHRPRVSRASSVAGDKPRTFLPSTTASKISALEGLLKPQTPSYNHHTRLHRQRALDYGSQSGREGQGFHILIPTILGLFLLALLGLVVKRAVERRKALSRRARRLAVRMRALESSQRPRGSPRPRSQNNIYSACPRRARGADAAGTGEAPVPGPGAPLPPAPLQVSESPWLHAPSLKTSCEYVSLYHQPAAMMEDSDSDDYINVPA

SEQ ID NO: 3512 - protein, 634 aa, Homo sapiens
MESGRGSSTPPGPIAALGMPDTGPGSSSLGKLQALPVGPRAHCGDPVSLAAAGDGSPDIGPTGELSGSLKIPNRDSGIDSPSSSVAGENFPCEEGLEAGPSPTVLGAHAEMALDSQVPKVTPQEEADSDVGEEPDSENTPQKADKDAGLAQHSGPQKLLHIAQELLHTEETYVKRLHLLDQVFCTRLTDAGIPPEVIMGIFSNISSIHRFHGQFLLPELKTRITEEWDTNPRLGDILQKLAPFLKMYGEYVKNFDRAVGLVSTWTQRSPLFKDVVHSIQKQEVCGNLTLQHHMLEPVQRVPRYELLLKDYLKRLPQDAPDRKDAERSLELISTAANHSNAAIRKVEKMHKLLEVYEQLGGEEDIVNPANELIKEGQIQKLSAKNGTPQDRHLFLFNSMILYCVPKLRLMGQKFSVREKMDISGLQVQDIVKPNTAHTFIITGRKRSLELQTRTEEEKKEWIQIIQATIEKHKQNSETFKAFGGAFSQDEDPSLSPDMPITSTSPVEPVVTTEGSSGAAGLEPRKLSSKTRRDKEKQSCKSCGETFNSITKRRHHCKLCGAVICGKCSEFKAENSRQSRVCRDCFLTQPVAPESTEVGAPSSCSPPGGAAEPPDTCSCAPAAPAASAFGVSLGPG

SEQ ID NO: 3513 - protein, 398 aa, Homo sapiens
MEEDDSYVPSDLTAEERQELENIRRRKQELLADIQRLKDEIAEVANEIENLGSTEERKNMQRNKQVAMGRKKFNMDPKKGIQFLIENDLLKNTCEDIAQFLYKGEGLNKTAIGDYLGERDEFNIQVLHAFVELHEFTDLNLVQALRQFLWSFRLPGEAQKIDRMMEAFAQRYCQCNNGVFQSTDTCYVLSFAIIMLNTSLHNPNVKDKPTVERFIAMNRGINDGGDLPEELLRNLYESIKNEPFKIPEDDGNDLTHTFFNPDREGWLLKLGGGRVKTWKRRWFILTDNCLYYFEYTTDKEPRGIIPLENLSIREVEDSKKPNCFELYIPDNKDQVIKACKTEADGRVVEGNHTVYRISAPTPEEKEEWIKCIKAAISRDPFYEMLAARKKKVSSTKRH

SEQ ID NO: 3514 - protein, 397 aa, Homo sapiens
MEEDDSYVPSDLTAEERQELENIRRRKQELLADIQRLKDEIAEVANEIENLGSTEERKNMQRNKQVAMGRKKFNMDPKKGIQFLIENDLLKNTCEDIAQFLYKGEGLNKTAIGDYLGERDEFNIQVLHAFVELHEFTDLNLVQALRQFLWSFRLPGEAQKIDRMMEAFAQRYCQCNNGVFQSTDTCYVLSFAIIMLNTSLHNPNVKDKPTVERFIAMNRGINDGGDLPEELLRNLYESIKNEPFKIPEDDGNDLTHTFFNPDREGWLLKLGGRVKTWKRRWFILTDNCLYYFEYTTDKEPRGIIPLENLSIREVEDSKKPNCFELYIPDNKDQVIKACKTEADGRVVEGNHMFTGSQLRRPEEKEEWIKCIKAAISRDPFYEMLAARKKKVSSTKRH

SEQ ID NO: 3515 - protein, 613 aa, Homo sapiens
MGALRPTLLPPSLPLLLLLMLGMGCWAREVLVPEGPLYRVAGTAVSISCNVTGYEGPAQQNFEWFLYRPEAPDTALGIVSTKDTQFSYAVFKSRVVAGEVQVQRLQGDAVVLKIARLQAQDAGIYECHTPSTDTRYLGSYSGKVELRVLPDVLQVSAAPPGPRGRQAPTSPPRMTVHEGQELALGCLARTSTQKHTHLAVSFGRSVPEAPVGRSTLQEVVGIRSDLAVEAGAPYAERLAAGELRLGKEGTDRYRMVVGGAQAGDAGTYHCTAAEWIQDPDGSWAQIAEKRAVLAHVDVQTLSSQLAVTVGPGERRIGPGEPLELLCNVSGALPPAGRHAAYSVGWEMAPAGAPGPGRLVAQLDTEGVGSLGPGYEGRHIAMEKVASRTYRLRLEAARPGDAGTYRCLAKAYVRGSGTRLREAASARSRPLPVHVREEGVVLEAVAWLAGGTVYRGETASLLCNISVRGGPPGLRLAASWWVERPEDGELSSVPAQLVGGVGQDGVAELGVRPGGGPVSVELVGPRSHRLRLHSLGPEDEGVYHCAPSAWVQHADYSWYQAGSARSGPVTVYPYMHALDTLFVPLLVGTGVALVTGATVLGTITCCFMKRLRKR

SEQ ID NO: 3516 - protein, 423 aa, Homo sapiens
MAPIPKTVGRIKLDCSLRPSCPLEVAAAPKLCKEFGPEDYGEEDIVDFLRRLVESDHQGLHRIHVDGSSGRLQLWHHDYLLGHLDDEGKSTGQSDRGKGAEGLGTYCGLRKSFLYPPQESEPCPQSPSASATFPSVSDSLLQVAMPQKLLVTEEEANRLAEELVAEEERMKQKAEKKRLKKKRQKERKRQERLEQYCGEPKASTTSDGDESPPSSPGNPVQGQCGEEEDSLDLSSTFVSLALRKVGDWPLSARREKGLNQEPQGRGLALQKMGQEEESPPREERPQQSPKVQASPGLLAAALQQSQELAKLGTSFAQNGFYHEAVVLFTQAFEAQPPGPPVGGGLARAGQSVEDSDLWPPSVFIRLFGNRSFCHERLGQPAWALADAQVALTLRPGWPRGLFRLGKALMGLQVIGLGLETGEI

SEQ ID NO: 3517 - protein, 785 aa, Homo sapiens
MADLDSPPKLSGVQQPSEGVGGGRCSEISAELIRSLTELQELEAVYERLCGEEKVVERELDALLEQQNTIESKMVTLHRMGPNLQLIEGDAKQLAGMITFTCNLAENVSSKVRQLDLAKNRLYQAIQRADDILDLKFCMDGVQTALRSEDYEQAAAHIHRYLCLDKSVIELSRQGKGGSMIDANLKLLQEAEQRLKAIVAEKFAIATKEGDLPQVERFFKIFPLLGLHEEGLRRFSEYLCKQVASKAEENLLMVLGTDMSDRRAAVIFADTLTLLFEGIARIVEAHQPIVETYYGPGRLYTLIKYLQVECDRQVEKVVDKFIKQRDYHQQFRHVQNNLMRNSTTEKIEPRELDPILTEVTLMNARSELYLRFLKKRISSDFEVGDSMASEEVKQEHQKCLDKLLNNCLLSCTMQELIGLYVTMEEYFMRETVNKAVALDTYEKGQLTSSMVDDVFYIVKKCIGRALSSSSIDCLCAMINLATTELESDFRDVLCNKLRMGFPATTFQDIQRGVTSAVNIMHSSLQQGKFDTKGIESTDEAKMSFLVTLNNVEVCSENISTLKKTLESDCTKLFSQGIGGEQAQAKFDGCLSDLAAVSNKFRDLLQEGLTELNSTAIKPQVQPWINSFFSVSHNIEEEEFNDYEANDPWVQQFILNLEQQMAEFKASLSPVIYDSLTGLMTSLVAVELEKVVLKSTFNRLGGLQFDKELRSLIAYLTTVTTWTIRDKFARLSQMATILNLERVTEILDYWGPNSGPLTWRLTPAEVRQVLALRIDFRSEDIKRLRL

SEQ ID NO: 3518 - protein, 756 aa, Homo sapiens
MSWSPSLTTQTCGAWEMKERLGTGGFGNVIRWHNQETGEQIAIKQCRQELSPRNRERWCLEIQIMRRLTHPNVVAARDVPEGMQNLAPNDLPLLAMEYCQGGDLRKYLNQFENCCGLREGAILTLLSDIASALRYLHENRIIHRDLKPENIVLQQGEQRLIHKIIDLGYAKELDQGSLCTSFVGTLQYLAPELLEQQKYTVTVDYWSFGTLAFECITGFRPFLPNWQPVQWHSKVRQKSEVDIVVSEDLNGTVKFSSSLPYPNNLNSVLAERLEKWLQLMLMWHPRQRGTDPTYGPNGCFKALDDILNLKLVHILNMVTGTIHTYPVTEDESLQSLKARIQQDTGIPEEDQELLQEAGLALIPDKPATQCISDGKLNEGHTLDMDLVFLFDNSKITYETQISPRPQPESVSCILQEPKRNLAFFQLRKVWGQVWHSIQTLKEDCNRLQQGQRAAMMNLLRNNSCLSKMKNSMASMSQQLKAKLDFFKTSIQIDLEKYSEQTEFGITSDKLLLAWREMEQAVELCGRENEVKLLVERMMALQTDIVDLQRSPMGRKQGGTLDDLEEQARELYRRLREKPRDQRTEGDSQEMVRLLLQAIQSFEKKVRVIYTQLSKTVVCKQKALELLPKVEEVVSLMNEDEKTVVRLQEKRQKELWNLLKIACSKVRGPVSGSPDSMNASRLSQPGQLMSQPSTASNSLPEPAKKSEELVAEAHNLCTLLENAIQDTVREQDQSFTALDWSWLQTEEEEHSCLEQAS

SEQ ID NO: 3519 - protein, 490 aa, Homo sapiens
MTSFSTSAQCSTSDSACRISPGQINQVRPKLPLLKILHAAGAQGEMFTVKEVMHYLGQYIMVKQLYDQQEQHMVYCGGDLLGELLGRQSFSVKDPSPLYDMLRKNLVTLATATTDAAQTLALAQDHSMDIPSQDQLKQSAEESSTSRKRTTEDDIPTLPTSEHKCIHSREDEDLIENLAQDETSRLDLGFEEWDVAGLPWWFLGNLRSNYTPRSNGSTDLQTNQDVGTAIVSDTTDDLWFLNESVSEQLGVGIKVEAADTEQTSEEVGKVSDKKVIEVGKNDDLEDSKSLSDDTDVEVTSEDEWQCTECKKFNSPSKRYCFRCWALRKDWYSDCSKLTHSLSTSDITAIPEKENEGNDVPDCRRTISAPVVRPKDAYIKKENSKLFDPCNSVEFLDLAHSSESQETISSMGEQLDNLSEQRTDTENMEDCQNLLKPCSLCEKRPRDGNIIHGRTGHLVTCFHCARRLKKAGASCPICKKEIQLVIKVFIA

SEQ ID NO: 3520 - protein, 518 aa, Homo sapiens
MLRVVSWNINGIRRPLQGVANQEPSNCAAVAVGRILDELDADIVCLQETKVTRDALTEPLAIVEGYNSYFSFSRNRSGYSGVATFCKDNATPVAAEEGLSGLFATQNGDVGCYGNMDEFTQEELRALDSEGRALLTQHKIRTWEGKEKTLTLINVYCPHADPGRPERLVFKMRFYRLLQIRAEALLAAGSHVIILGDLNTAHRPIDHWDAVNLECFEEDPGRKWMDSLLSNLGCQSASHVGPFIDSYRCFQPKQEGAFTCWSAVTGARHLNYGSRLDYVLGDRTLVIDTFQASFLLPEVMGSDHCPVGAVLSVSSVPAKQCPPLCTRFLPEFAGTQLKILRFLVPLEQSPVLEQSTLQHNNQTRVQTCQNKAQVRSTRPQPSQVGSSRGQKNLKSYFQPSPSCPQASPDIELPSLPLMSALMTPKTPEEKAVAKVVKGQAKTSEAKDEKELRTSFWKSVLAGPLRTPLCGGHREPCVMRTVKKPGPNLGRRFYMCARPRGPPTDPSSRCNFFLWSRPS

SEQ ID NO: 3521 - protein, 830 aa, Homo sapiens
MGSMFRSEEVALVQLFLPTAAAYTCVSRLGELGLVEFRDLNASVSAFQRRFVVDVRRCEELEKTFTFLQEEVRRAGLVLPPPKGRLPAPPPRDLLRIQEETERLAQELRDVRGNQQALRAQLHQLQLHAAVLRQGHEPQLAAAHTDGASERTPLLQAPGGPHQDLRVNFVAGAVEPHKAPALERLLWRACRGFLIASFRELEQPLEHPVTGEPATWMTFLISYWGEQIGQKIRKITDCFHCHVFPFLQQEEARLGALQQLQQQSQELQEVLGETERFLSQVLGRVLQLLPPGQVQVHKMKAVYLALNQCSVSTTHKCLIAEAWCSVRDLPALQEALRDSSMEEGVSAVAHRIPCRDMPPTLIRTNRFTASFQGIVDAYGVGRYQEVNPAPYTIITFPFLFAVMFGDVGHGLLMFLFALAMVLAENRPAVKAAQNEIWQTFFRGRYLLLLMGLFSIYTGFIYNECFSRATSIFPSGWSVAAMANQSGWSDAFLAQHTMLTLDPNVTGVFLGPYPFGIDPIWSLAANHLSFLNSFKMKMSVILGVVHMAFGVVLGVFNHVHFGQRHRLLLETLPELTFLLGLFGYLVFLVIYKWLCVWAARAASAPSILIHFINMFLFSHSPSNRLLYPRQEVVQATLVVLALAMVPILLLGTPLHLLHRHRRRLRRRPADRQEENKAGLLDLPDASVNGWSSDEEKAGGLDDEEEAELVPSEVLMHQAIHTIEFCLGCVSNTASYLRLWALSLAHAQLSEVLWAMVMRIGLGLGREVGVAAVVLVPIFAAFAVMTVAILLVMEGLSAFLHALRLHWVEFQNKFYSGTGYKLSPFTFAATDD

SEQ ID NO: 3522 - protein, 614 aa, Homo sapiens
MTFLISYWGEQIGQKIRKITDCFHCHVFPFLQQEEARLGALQQLQQQSQELQEVLGETERFLSQVLGRVLQLLPPGQVQVHKMKAVYLALNQCSVSTTHKCLIAEAWCSVRDLPALQEALRDSSMEEGVSAVAHRIPCRDMPPTLIRTNRFTASFQGIVDAYGVGRYQEVNPAPYTIITFPFLFAVMFGDVGHGLLMFLFALAMVLAENRPAVKAAQNEIWQTFFRGRYLLLLMGLFSIYTGFIYNECFSRATSIFPSGWSVAAMANQSGWSDAFLAQHTMLTLDPNVTGVFLGPYPFGIDPIWSLAANHLSFLNSFKMKMSVILGVVHMAFGVVLGVFNHVHFGQRHRLLLETLPELTFLLGLFGYLVFLVIYKWLCVWAARAASAPSILIHFINMFLFSHSPSNRLLYPRQEVVQATLVVLALAMVPILLLGTPLHLLHRHRRRLRRRPADRQEENKAGLLDLPDASVNGWSSDEEKAGGLDDEEEAELVPSEVLMHQAIHTIEFCLGCVSNTASYLRLWALSLAHAQLSEVLWAMVMRIGLGLGREVGVAAVVLVPIFAAFAVMTVAILLVMEGLSAFLHALRLHWVEFQNKFYSGTGYKLSPFTFAATDD

SEQ ID NO: 3523 - protein, 323 aa, Homo sapiens
MAAPKGSLWVRTQLGLPPLLLLTMALAGGSGTASAEAFDSVLGDTASCHRACQLTYPLHTYPKEEELYACQRGCRLFSICQFVDDGIDLNRTKLECESACTEAYSQSDEQYACHLGCQNQLPFAELRQEQLMSLMPKMHLLFPLTLVRSFWSDMMDSAQSFITSSWTFYLQADDGKIVIFQSKPEIQYAPHLEQEPTNLRESSLSKMSYLQMRNSQAHRNFLEDGESDGFLRCLSLNSGWILTTTLVLSVMVLLWICCATVATAVEQYVPSEKLSIYGDLEFMNEQKLNRYPASSLVVVRSKTEDHEEAGPLPTKVNLAHSEI

SEQ ID NO: 3524 - protein, 709 aa, Homo sapiens
MPGIDKLPIEETLEDSPQTRSLLGVFEEDATAISNYMNQLYQAMHRIYDAQNELSAATHLTSKLLKEYEKQRFPLGGDDEVMSSTLQQFSKVIDELSSCHAVLSTQLADAMMFPITQFKERDLKEILTLKEVFQIASNDHDAAINRYSRLSKKRENDKVKYEVTEDVYTSRKKQHQTMMHYFCALNTLQYKKKIALLEPLLGYMQAQISFFKMGSENLNEQLEEFLANIGTSVQNVRREMDSDIETMQQTIEDLEVASDPLYVPDPDPTKFPVNRNLTRKAGYLNARNKTGLVSSTWDRQFYFTQGGNLMSQARGDVAGGLAMDIDNCSVMAVDCEDRRYCFQITSFDGKKSSILQAESKKDHEEWICTINNISKQIYLSENPEETAARVNQSALEAVTPSPSFQQRHESLRPAAGQSRPPTARTSSSGSLGSESTNLAALSLDSLVAPDTPIQFDIISPVCEDQPGQAKAFGQGGRRTNPFGESGGSTKSETEDSILHQLFIVRFLGSMEVKSDDHPDVVYETMRQILAARAIHNIFRMTESHLLVTCDCLKLIDPQTQVTRLTFPLPCVVLYATHQENKRLFGFVLRTSSGRSESNLSSVCYIFESNNEGEKICDSVGLAKQIALHAELDRRASEKQKEIERVKEKQQKELNKQKQIEKDLEEQSRLIAASSRPNQASSEGQFVVLSSSQSEESDLGEGGKKRESEA

SEQ ID NO: 3525 - protein, 706 aa, Homo sapiens
MGRKVTVATCALNQWALDFEGNLQRILKSIEIAKNRGARYRLGPELEICGYGCWDHYYESDTLLHSFQVLAALVESPVTQDIICDVGMPVMHRNVRYNCRVIFLNRKILLIRPKMALANEGNYRELRWFTPWSRSRHTEEYFLPRMIQDLTKQETVPFGDAVLVTWDTCIGSEICEELWTPHSPHIDMGLDGVEIITNASGSHQVLRKANTRVDLVTMVTSKNGGIYLLANQKGCDGDRLYYDGCAMIAMNGSVFAQGSQFSLDDVEVLTATLDLEDVRSYRAEISSRNLAASRASPYPRVKVDFALSCHEDLLAPISEPIEWKYHSPEEEISLGPACWLWDFLRRSQQAGFLLPLSGGVDSAATACLIYSMCCQVCEAVRSGNEEVLADVRTIVNQISYTPQDPRDLCGRILTTCYMASKNSSQETCTRARELAQQIGSHHISLNIDPAVKAVMGIFSLVTGKSPLFAAHGGSSRENLALQNVQARIRMVLAYLFAQLSLWSRGVHGGLLVLGSANVDESLLGYLTKYDCSSADINPIGGISKTDLRAFVQFCIQRFQLPALQSILLAPATAELEPLADGQVSQTDEEDMGMTYAELSVYGKLRKVAKMGPYSMFCKLLGMWRHICTPRQVADKVKRFFSKYSMNRHKMTTLTPAYHAENYSPEDNRFDLRPFLYNTSWPWQFRCIENQVLQLERAEPQSLDGVD

SEQ ID NO: 3526 - protein, 915 aa, Homo sapiens
MAETLSGLGDSGAAGAAALSSASSETGTRRLSDLRVIDLRAELRKRNVDSSGNKSVLMERLKKAIEDEGGNPDEIEITSEGNKKTSKRSSKGRKPEEEGVEDNGLEENSGDGQEDVETSLENLQDIDIMDISVLDEAEIDNGSVADCVEDDDADNLQESLSDSRELVEGEMKELPEQLQEHAIEDKETINNLDTSSSDFTILQEIEEPSLEPENEKILDILGETCKSEPVKEESSELEQPFAQDTSSVGPDRKLAEEEDLFDSAHPEEGDLDLASESTAHAQSSKADSLLAVVKREPAEQPGDGERTDCEPVGLEPAVEQSSAASELAEASSEELAEAPTEAPSPEARDSKEDGRKFDFDACNEVPPAPKESSTSEGADQKMSSPEDDSDTKRLSKEEKGRSSCGRNFWVSGLSSTTRATDLKNLFSKYGKVVGAKVVTNARSPGARCYGFVTMSTAEEATKCINHLHKTELHGKMISVEKAKNEPVGKKTSDKRDSDGKKEKSSNSDRSTNLKRDDKCDRKDDAKKGDDGSGEKSKDQDDQKPGPSERSRATKSGSRGTERTVVMDKSKGVPVISVKTSGSKERASKSQDRKSASREKRSVVSFDKVKEPRKSRDSESHSRVRERSEREQRMQAQWEREERERLEIARERLAFQRQRLERERMERERLERERMHVEHERRREQERIHREREELRRQQELRYEQERRPAVRRPYDLDRRDDAYWPEAKRAALDERYHSDFNRQDRFHDFDHRDRGRYPDHSVDRREGSRSMMGEREGQHYPERHGGPERHGRDSRDGWGGYGSDKRMSEGRGLPPPPRRDWGDHGRREDDRSWQGTADGGMMDRDHKRWQGGERSMSGHSGPGHMMNRGGMSGRGSFAPGGASRGHPIPHGGMQGGFGGQSRGSRPSDARFTRRY

SEQ ID NO: 3527 - protein, 343 aa, Homo sapiens
MWAAAGGLWRSRAGLRALFRSRDAALFPGCERGLHCSAVSCKNWLKKFASKTKKKVWYESPSLGSHSTYKPSKLEFLMRSTSKKTRKEDHARLRALNGLLYKALTDLLCTPEVSQELYDLNVELSKVSLTPDFSACRAYWKTTLSAEQNAHMEAVLQRSAAHMRHLLMSQQTLRNVPPIVFVQDKGNAALAELDQLLAVADFGPRDERDNFVQNDFRDPDAPQPCGTTEPTTSSSLCGIDHEALNKQIMEYKRRKDKGLGGLVWQGQVAELTTQMQKGRKRAKPRLEQDSSLKSYLSGEEVEDDLDLVGAPEYECYAPDTEELEAERGGGRTEDGHSCGASRE

SEQ ID NO: 3528 - protein, 424 aa, Homo sapiens
MAAGPISERNQDATVYVGGLDEKVSEPLLWELFLQAGPVVNTHMPKDRVTGQHQGYGFVEFLSEEDADYAIKIMNMIKLYGKPIRVNKASAHNKNLDVGANIFIGNLDPEIDEKLLYDTFSAFGVILQTPKIMRDPDTGNSKGYAFINFASFDASDAAIEAMNGQYLCNRPITVSYAFKKDSKGERHGSAAERLLAAQNPLSQADRPHQLFADAPPPPSAPNPVVSSLGSGLPPPGMPPPGSFPPPVPPPGALPPGIPPAMPPPPMPPGAAGHGPPSAGTPGAGHPGHGHSHPHPFPPGGMPHPGMSQMQLAHHGPHGLGHPHAGPPGSGGQPPPRPPPGMPHPGPPPMGMPPRGPPFGSPMGHPGPMPPHGMRGPPPLMPPHGYTGPPRPPPYGYQRGPLPPPRPTPRPPVPPRGPLRGPLPQ

SEQ ID NO: 3529 - protein, 215 aa, Homo sapiens
MGLEKPQSKLEGGMHPQLIPSVIAVVFILLLSVCFIASCLVTHHNFSRCKRGTGVHKLEHHAKLKCIKEKSELKSAEGSTWNCCPIDWRAFQSNCYFPLTDNKTWAESERNCSGMGAHLMTISTEAEQNFIIQFLDRRLSYFLGLRDENAKGQWRWVDQTPFNPRRVFWHKNEPDNSQGENCVVLVYNQDKWAWNDVPCNFEASRICKIPGTTLN

SEQ ID NO: 3530 - protein, 580 aa, Homo sapiens
MESQCDYSMYFPAVPLPPRAELAGDPGRYRALPRRNHLYLGETVRFLLVLRCRGGAGSGTGGGPGLGSRGAWAELATALAALASVSAGGGMPGGGGAGDQDSEPPGGGDPGGGGLFRGCSPLLTHGPGPATSGGATTLPVEEPIVSTDEVIFPLTVSLDRLPPGTPKAKIVVTVWKREIEAPEVRDQGYLRLLQTRSPGETFRGEQSAFKAQVSTLLTLLPPPVLRCRQFTVAGKHLTVLKVLNSSSQEEISIWDIRILPNFNASYLPVMPDGSVLLVDNVCHQSGEVSMGSFCRLPGTSGCFPCPLNALEEHNFLFQLRGGEQPPPGAKEGLEVPLIAVVQWSTPKLPFTQSIYTHYRLPSVRLDRPCFVMTASCKSPVRTYERFTVTYTLLNNLQDFLAVRLVWTPEHAQAGKQLCEEERRAMQAALDSVVCHTPLNNLGFSRKGSALTFSVAFQALRTGLFELSQHMKLKLQFTASVSHPPPEARPLSRKSSPSSPAVRDLVERHQASLGRSQSFSHQQPSRSHLMRSGSVMERRAITPPVASPVGRPLYLPPDKAVLSLDKIAKRECKVLVVEPVK

SEQ ID NO: 3531 - protein, 373 aa, Homo sapiens
MENQVLTPHVYWAQRHRELYLRVELSDVQNPAISITENVLHFKAQGHGAKGDNVYEFHLEFLDLVKPEPVYKLTQRQVNITVQKKVSQWWERLTKQEKRPLFLAPDFDRWLDESDAEMELRAKEEERLNKLRLESEGSPETLTNLRKGYLFMYNLVQFLGFSWIFVNLTVRFCILGKESFYDTFHTVADMMYFCQMLAVVETINAAIGVTTSPVLPSLIQLLGRNFILFIIFGTMEEMQNKAVVFFVFYLWSAIEIFRYSFYMLTCIDMDWKVLTWLRYTLWIPLYPLGCLVEAVSVIQSIPIFNETGRFSFTLPYPVKIKVRFSFFLQIYLIMIFLGLYINFRHLYKQRRRRYGKKRKRSTKKKDLDGFLPV

SEQ ID NO: 3532 - protein, 445 aa, Homo sapiens
MNEEYDVIVLGTGLTECILSGIMSVNGKKVLHMDRNPYYGGESASITPLEDLYKRFKIPGSPPESMGRGRDWNVDLIPKFLMANGQLVKMLLYTEVTRYLDFKVTEGSFVYKGGKIYKVPSTEAEALASSLMGLFEKRRFRKFLVYVANFDEKDPRTFEGIDPKKTTMRDVYKKFDLGQDVIDFTGHALALYRTDDYLDQPCYETINRIKLYSESLARYGKSPYLYPLYGLGELPQGFARLSAIYGGTYMLNKPIEEIIVQNGKVIGVKSEGEIARCKQLICDPSYVKDRVEKVGQVIRVICILSHPIKNTNDANSCQIIIPQNQVNRKSDIYVCMISFAHNVAAQGKYIAIVSTTVETKEPEKEIRPALELLEPIEQKFVSISDLLVPKDLGTESQIFISRTYDATTHFETTCDDIKNIYKRMTGSEFDFEEMKRKKNDIYGED

SEQ ID NO: 3533 - protein, 221 aa, Homo sapiens
MSDGDYDYLIKFLALGDSGVGKTSVLYQYTDGKFNSKFITTVGIDFREKRVVYRASGPDGATGRGQRIHLQLWDTAGQERFRSLTTAFFRDAMGFLLLFDLTNEQSFLNVRNWISQLQMHAYCENPDIVLCGNKSDLEDQRVVKEEEAIALAEKYGIPYFETSAANGTNISQAIEMLLDLIMKRMERCVDKSWIPEGVVRSNGHASTDQLSEEKEKGACGC

SEQ ID NO: 3534 - protein, 221 aa, Homo sapiens; identical to SEQ ID NO: 3533

SEQ ID NO: 3535 - protein, 221 aa, Homo sapiens; identical to SEQ ID NO: 3533

SEQ ID NO: 3536 - protein, 221 aa, Homo sapiens; identical to SEQ ID NO: 3533

SEQ ID NO: 3537 - protein, 214 aa, Homo sapiens
MDGLLLDTERLYSVVFQEICNRYDKKYSWDVKSLVMGKKALEAAQIIIDVLQLPMSKEELVEESQTKLKEVFPTAALMPGAEKLIIHLRKHGIPFALATSSGSASFDMKTSRHKEFFSLFSHIVLGDDPEVQHGKPDPDIFLACAKRFSPPPAMEKCLVFEDAPNGVEAALAAGMQVVMVPDGNLSRDLTTKATLVLNSLQDFQPELFGLPSYE

SEQ ID NO: 3538 - protein, 416 aa, Homo sapiens
MSISLSSLILLPIWINMAQIQQGGPDEKEKTTALKDLLSRIDLDELMKKDEPPLDFPDTLEGFEYAFNEKGQLRHIKTGEPFVFNYREDLHRWNQKRYEALGEIITKYVYELLEKDCNLKKVSIPVDATESEPKSFIFMSEDALTNPQKLMVLIHGSGVVRAGQWARRLIINEDLDSGTQIPFIKRAVAEGYGVIVLNPNENYIEVEKPKIHVQSSSDSSDEPAEKRERKDKVSKETKKRRDFYEKYRNPQREKEMMQLYIRENGSPEEHAIYVWDHFIAQAAAENVFFVAHSYGGLAFVELMIQREADVKNKVTAVALTDSVHNVWHQEAGKTIREWMRENCCNWVSSSEPLDTSVESMLPDCPRVSAGTDRHELTSWKSFPSIFKFFTEASEAKTSSLKPAVTRRSHRIKHEEL

SEQ ID NO: 3539 - protein, 908 aa, Homo sapiens
MKSSVAQIKPSSGHDRRENLNSYQRNSSPEDRYEEQERSPRDRDYFDYSRSDYEHSRRGRSYDSSMESRNRDREKRRERERDTDRKRSRKSPSPGRRNPETSVTQSSSAQDEPATKKKKDELDPLLTRTGGAYIPPAKLRMMQEQITDKNSLAYQRMSWEALKKSINGLINKVNISNISIIIQELLQENIVRGRGLLSRSVLQAQSASPIFTHVYAALVAIINSKFPQIGELILKRLILNFRKGYRRNDKQLCLTASKFVAHLINQNVAHEVLCLEMLTLLLERPTDDSVEVAIGFLKECGLKLTQVSPRGINAIFERLRNILHESEIDKRVQYMIEVMFAVRKDGFKDHPIILEGLDLVEEDDQFTHMLPLEDDYNPEDVLNVFKMDPNFMENEEKYKAIKKEILDEGDTDSNTDQDAGSSEEDEEEEEEEGEEDEEGQKVTIHDKTEINLVSFRRTIYLAIQSSLDFEECAHKLLKMEFPESQTKELCNMILDCCAQQRTYEKFFGLLAGRFCMLKKEYMESFEGIFKEQYDTIHRLETNKLRNVAKMFAHLLYTDSLPWSVLECIKLSEETTTSSSRIFVKIFFQELCEYMGLPKLNARLKDETLQPFFEGLLPRDNPRNTRFAINFFTSIGLGGLTDELREHLKNTPKVIVAQKPDVEQNKSSPSSSSSASSSSESDSSDSDSDSSDSSSESSSEESDSSSISSHSSASANDVRKKGHGKTRSKEVDKLIRNQQTNDRKQKERRQEHGHQETRTERERRSEKHRDQNSSGSNWRDPITKYTSDKDVPSERNNYSRVANDRDQEMHIDLENKHGDPKKKRGERRNSFSENEKHTHRIKDSENFRRKDRSKSKEMNRKHSGSRSDEDRYQNGAERRWEKSSRYSEQSRESKKNQDRRREKSPAKQK

SEQ ID NO: 3540 - protein, 383 aa, Homo sapiens
MADKVLKEKRKLFIRSMGEGTINGLLDELLQTRVLNKEEMEKVKRENATVMDKTRALIDSVIPKGAQACQICITYICEEDSYLAGTLGLSAAPQAVQDNPAMPTSSGSEGNVKLCSLEEAQRIWKQKSAEIYPIMDKSSRTRLALIICNEEFDSIPRRTGAEVDITGMTMLLQNLGYSVDVKKNLTASDMTTELEAFAHRPEHKTSDSTFLVFMSHGIREGICGKKHSEQVPDILQLNAIFNMLNTKNCPSLKDKPKVIIIQACRGDSPGVVWFKDSVGVSGNLSLPTTEEFEDDAIKKAHIEKDFIAFCSSTPDNVSWRHPTMGSVFIGRLIEHMQEYACSCDVEEIFRKVRFSFEQPDGRAQMPTTERVTLTRCFYLFPGH

SEQ ID NO: 3541 - protein, 404 aa, Homo sapiens
MADKVLKEKRKLFIRSMGEGTINGLLDELLQTRVLNKEEMEKVKRENATVMDKTRALIDSVIPKGAQACQICITYICEEDSYLAGTLGLSADQTSGNYLNMQDSQGVLSSFPAPQAVQDNPAMPTSSGSEGNVKLCSLEEAQRIWKQKSAEIYPIMDKSSRTRLALIICNEEFDSIPRRTGAEVDITGMTMLLQNLGYSVDVKKNLTASDMTTELEAFAHRPEHKTSDSTFLVFMSHGIREGICGKKHSEQVPDILQLNAIFNMLNTKNCPSLKDKPKVIIIQACRGDSPGVVWFKDSVGVSGNLSLPTTEEFEDDAIKKAHIEKDFIAFCSSTPDNVSWRHPTMGSVFIGRLIEHMQEYACSCDVEEIFRKVRFSFEQPDGRAQMPTTERVTLTRCFYLFPGH

SEQ ID NO: 3542 - protein, 311 aa, Homo sapiens
MADKVLKEKRKLFIRSMGEAPQAVQDNPAMPTSSGSEGNVKLCSLEEAQRIWKQKSAEIYPIMDKSSRTRLALIICNEEFDSIPRRTGAEVDITGMTMLLQNLGYSVDVKKNLTASDMTTELEAFAHRPEHKTSDSTFLVFMSHGIREGICGKKHSEQVPDILQLNAIFNMLNTKNCPSLKDKPKVIIIQACRGDSPGVVWFKDSVGVSGNLSLPTTEEFEDDAIKKAHIEKDFIAFCSSTPDNVSWRHPTMGSVFIGRLIEHMQEYACSCDVEEIFRKVRFSFEQPDGRAQMPTTERVTLTRCFYLFPGH

SEQ ID NO: 3543 - protein, 263 aa, Homo sapiens
MADKVLKEKRKLFIRSMGEAPQAVQDNPAMPTSSGSEGNVKLCSLEEAQRIWKQKSAEIYPIMDKSSRTRLALIICNEEFDSIPRRTGAEVDITGMTMLLQNLGYSVDVKKNLTASDMTTELEAFAHRPEHKTSDSTFLVFMSHGIREGICGKKHSEQVPDILQLNAIFNMLNTKNCPSLKDKPKVIIIQACRGDNVSWRHPTMGSVFIGRLIEHMQEYACSCDVEEIFRKVRFSFEQPDGRAQMPTTERVTLTRCFYLFPGH

SEQ ID NO: 3544 - protein, 88 aa, Homo sapiens
MADKVLKEKRKLFIRSMGEDNVSWRHPTMGSVFIGRLIEHMQEYACSCDVEEIFRKVRFSFEQPDGRAQMPTTERVTLTRCFYLFPGH

SEQ ID NO: 3545 - protein, 593 aa, Homo sapiens
MDRMTEDALRLNLLKRSLDPADERDDVLAKRLKMEGHEAMERLKMLALLKRKDLANLEVPHELPTKQDGSGVKGYEEKLNGNLRPHGDNRTAGRPGKENINDEPVDMSARRSEPERGRLTPSPDIIVLSDNEASSPRSSSRMEERLKAANLEMFKGKGIEERQQLIKQLRDELRLEEARLVLLKKLRQSQLQKENVVQKTPVVQNAASIVQPSPAHVGQQGLSKLPSRPGAQGVEPQNLRTLQGHSVIRSATNTTLPHMLMSQRVIAPNPAQLQGQRGPPKPGLVRTTTPNMNPAINYQPQSSSSVPCQRTTSSAIYMNLASHIQPGTVNRVSSPLPSPSAMTDAANSQAAAKLALRKQLEKTLLEIPPPKPPAPLLHFLPSAANSEFIYMVGLEEVVQSVIDSQGKSCASLLRVEPFVCAQCRTDFTPHWKQEKNGKILCEQCMTSNQKKALKAEHTNRLKNAFVKALQQEQEIEQRLQQQAALSPTTAPAVSSVSKQETIMRHHTLRQAPQPQSSLQRGIPTSARSMLSNFAQAPQLSVPGGLLGMPGVNIAYLNTGIGGHKGPSLADRQREYLLDMIPPRSISQSISGQK

SEQ ID NO: 3546 - protein, 117 aa, Homo sapiens
MALETVPKDLRHLRACLLCSLVKTIDQFEYDGCDNCDAYLQMKGNREMVYDCTSSSFDGIIAMMSPEDSWVSKWQRVSNFKPGVYAVSVTGRLPQGIVRELKSRGVAYKSRDTAIKT

SEQ ID NO: 3547 - protein, 197 aa, Homo sapiens
MEYDEKLARFRQAHLNPFNKQSGPRQHEQGPGEEVPDVTPEEALPELPPGEPEFRCPERVMDLGLSEDHFSRPVGLFLASDVQQLRQAIEECKQVILELPEQSEKQKDAVVRLIHLRLKLQELKDPNEDEPNIRVLLEHRFYKEKSKSVKQTCDKCNTIIWGLIQTWYTCTGGPRPRRGVRNERDQSSCLRWAHIQM

SEQ ID NO: 3548 - protein, 512 aa, Homo sapiens
MAILSLRAPGPWQAMQVWADRTLLTPHTGVTSQVLGVAAAVMTPLPGGHAAGRTREARWDAMEYDEKLARFRQAHLNPFNKQSGPRQHEQGPGEEVPDVTPEEALPELPPGEPEFRCPERVMDLGLSEDHFSRPVGLFLASDVQQLRQAIEECKQVILELPEQSEKQKDAVVRLIHLRLKLQELKDPNEDEPNIRVLLEHRFYKEKSKSVKQTCDKCNTIIWGLIQTWYTCTGCYYRCHSKCLNLISKPCVSSKVSHQAEYELNICPETGLDSQDYRCAECRAPISLRGVPSEARQCDYTGQYYCSHCHWNDLAVIPARVVHNWDFEPRKVSRCSMRYLALMVSRPVLRLREINPLLFSYVEELVEIRKLRQDILLMKPYFITCREAMEARLLLQLQDRQHFVENDEMYSVQDLLDVHAGRLGCSLTEIHTLFAKHIKLDCERCQAKGFVCELCREGDVLFPFDSHTSVCADCSAVFHRDCYYDNSTTCPKCARLSLRKQSLFQEPGPDVEA

SEQ ID NO: 3549 - protein, 340 aa, Homo sapiens
MVTLRKRTLKVLTFLVLFIFLTSFFLNYSHTMVATTWFPKQMVLELSENLKRLIKHRPCTCTHCIGQRKLSAWFDERFNQTMQPLLTAQNALLEDDTYRWWLRLQREKKPNNLNDTIKELFRVVPGNVDPMLEKRSVGCRRCAVVGNSGNLRESSYGPEIDSHDFVLRMNKAPTAGFEADVGTKTTHHLVYPESFRELGDNVSMILVPFKTIDLEWVVSAITTGTISHTYIPVPAKIRVKQDKILIYHPAFIKYVFDNWLQGHGRYPSTGILSVIFSMHVCDEVDLYGFGADSKGNWHHYWENNPSAGAFRKTGVHDADFESNVTATLASINKIRIFKGR

SEQ ID NO: 3550 - protein, 340 aa, Homo sapiens; identical to SEQ ID NO: 3549

SEQ ID NO: 3551 - protein, 462 aa, Homo sapiens
MAATVNLELDPIFLKALGFLHSKSKDSAEKLKALLDESLARGIDSSYRPSQKDVEPPKISSTKNISIKQEPKISSSLPSGNNNGKVLTTEKVKKEAEKRPADKMKSDITEGVDIPKKPRLEKPETQSSPITVQSSKDLPMADLSSFEETSADDFAMEMGLACVVCRQMMVASGNQLVECQECHNLYHRDCHKPQVTDKEANDPRLVWYCARCTRQMKRMAQKTQKPPQKPAPAVVSVTPAVKDPLVKKPETKLKQETTFLAFKRTEVKTSTVISGNSSSASVSSSVTSGLTGWAAFAAKTSSAGPSTAKLSSTTQNNTGKPATSSANQKPVGLTGLATSSKGGIGSKIGSNNSTTPTVPLKPPPPLTLGKTGLSRSVSCDNVSKVGLPSPSSLVPGSSSQLSGNGNSGTSGPSGSTTSKTTSESSSSPSASLKGPTSQESQLNAMKRLQMVKKKAAQKKLKK

SEQ ID NO: 3552 - protein, 155 aa, Homo sapiens
MAVPGCNKDSVRAGCKKCGYPGHLTFECRNFLRVDPKRDIVLDVSSTSSEDSDEENEELNKLQALQEKRINEEEEKKKEKSKEKIKLKKKRKRSYSSSSTEEDTSKQKKQKYQKKEKKKEKKSKSKKGKHHKKEKKKRKKEKHSSTPNSSEFSRK

SEQ ID NO: 3553 - protein, 269 aa, Homo sapiens
MARASSGNGSEEAWGALRAPQQQLRELCPGVNNQPYLCESGHCCGETGCCTYYYELWWFWLLWTVLILFSCCCAFRHRRAKLRLQQQQRQREINLLAYHGACHGAGPFPTGSLLDLRFLSTFKPPAYEDVVHRPGTPPPPYTVAPGRPLTASSEQTCCSSSSSCPAHFEGTNVEGVSSHQSAPPHQEGEPGAGVTPASTPPSCRYRRLTGDSGIELCPCPASGEGEPVKEVRVSATLPDLEDYSPCALPPESVPQIFPMGLSSSEGDIP

SEQ ID NO: 3554 - protein, 2034 aa, Homo sapiens
MGSQVLQILRQGVWASLTGGWFFDPHQSTFSNCFHLYVWIFLLIFPFLLYMVLPPSLMVAGVYCLVVAVIFATIKTVNYRLHAMFDQGEIVEKRSSTMGELEEEPAQGDSNPPRDPGVEMTVFRKVSSTPPVRCSSQHSVFGFNQVSELLPRMEDSGPLRDIKELVREQGSNNVIVTSADREMLKLSSQEKLIGDLPQTPPGAVPDPSLASTDSSEPSPLAGDGAPWSGSSMADTPMSPLLKGSLSQELSKSFLTLTQPDRALVRTSSRREQRRGAGGYQPLDRRGSGEPTPQKAGSSDSCFSGTDRETLSSFKSEKTNSTHLDSPPGGPAPEGSDTDPPSEAELPASPDAGVPSDDTLRSFDTVIGAGTPPGLAEPLLVVRPKDLALLRPSKRQPPLRRHSPPGRAPRRPLLEGGGFFEDEDTSEGSELSPASSLRSQRRYSTDSSSSTSCYSPESSRGAAGGPRKRRAPHGAEEGTAVPPKRPYGTQRTPSTASAKTHARVLSMDGAGGDVLRPPLAGCKAELEAQVGVEQAASEPVVLPAEARRGPAANQPGWRGELQEEGAVGGAAEETGRRDRSSSVRRTQAIRRRHNAGSNPTPPASVMGSPPSSLQEAQRGRAASHSRALTLPSALHFASSLLLTRAGANVHEACTFDDTSEGAVHYFYDESGVRRSYTFGLAGGGYENPVGQQGEQTANGAWDRHSHSSSFHSADVPEATGGLNLLQPRPVVLQGMQVRRVPLEIPEEQTLMEEAPPRAQHSYKYWLLPGRWTSVRYERLALLALLDRTRGVLENIFGVGLSSLVAFLGYLLLLKGFFTDIWVFQFCLVIASCQYSLLKSVQPDAASPMHGHNWVIAYSRPVYFCICCLLIWLLDALGSAQPFPPVSLYGLTLFSASFFFCARDVATVFTLCFPFVFLLGLLPQVNTCLMYLLEQIDMHGFGGTAATSPLTAVFSLSRSLLAAALLYGFCLGAIKTPWPEQHVPVLFSVFCGLLVALSYHLSRQSSDPTVLWSLIRSKLFPELEERSLETARAEPPDPLPDKMRQSVREVLHSDLVMCVVIAVLTFAISASTVFIALKSVLGFVLYALAGAVGFFTHYLLPQLRKQLPWFCLSQPVLKPLEYSQYEVRGAAQVMWFEKLYAGLQCVEKYLIYPAVVLNALTVDAHTVVSHPDKYCFYCRALLMTVAGLKLLRSAFCCPPQQYLTLAFTVLLFHFDYPRLSQGFLLDYFLMSLLCSKLWDLLYKLRFVLTYIAPWQITWGSAFHAFAQPFAVPHSAMLFVQALLSGLFSTPLNPLLGSAVFIMSYARPLKFWERDYNTKRVDHSNTRLVTQLDRNPGADDNNLNSIFYEHLTRSLQHTLCGDLVLGRWGNYGPGDCFVLASDYLNALVHLIEVGNGLVTFQLRGLEFRGTYCQQREVEAITEGVEEDEGCCCCEPGHLPRVLSFNAAFGQRWLAWEVTASKYVLEGYSISDNNAASMLQVFDLRKILITYYVKSIIYYVSRSPKLEVWLSHEGITAALRPVRVPGYADSDPTFSLSVDEDYDLRLSGLSLPSFCAVHLEWIQYCASRRSQPVDQDWNSPLVTLCFGLCVLGRRALGTASHSMSASLEPFLYGLHALFKGDFRITSPRDEWVFADMDLLHRVVAPGVRMALKLHQDHFTSPDEYEEPAALYDAIAANEERLVISHEGDPAWRSAILSNTPSLLALRHVLDDASDEYKIIMLNRRHLSFRVIKVNRECVRGLWAGQQQELVFLRNRNPERGSIQNAKQALRNMINSSCDQPLGYPIYVSPLTTSLAGSHPQLRALWGGPISLGAIAHWLLRTWERLHKGCGAGCNSGGNVDDSDCSGGGGLTSLSNNPPVAHPTPENTAGNGDQPLPPGPGWGPRSSLSGSGDGRPPPLLQWPPPRLPGPPPASPIPTEGPRTSRPPGPGLLSSEGPSGKWSLGGRKGLGGSDGEPASGSPKGGTPKSQAPLDLSLSLSLSLSPDVSTEASPPRASQDIPCLDSSAPESGTPMGALGDWPAPIEERESPAAQPLLEHQY

SEQ ID NO: 3555 - protein, 903 aa, Homo sapiens [sequence omitted]

SEQ ID NO: 3556 - protein, 1301 aa, Homo sapiens
MQVRRVPLEIPEEQTLMEEAPPRAQHSYKYWLLPGRWTSVRYERLALLALLDRTRGVLENIFGVGLSSLVAFLGYLLLLKGFFTDIWVFQFCLVIASCQYSLLKSVQPDAASPMHGHNWVIAYSRPVYFCICCLLIWLLDALGSAQPFPPVSLYGLTLFSASFFFCARDVATVFTLCFPFVFLLGLLPQVNTCLMYLLEQIDMHGFGGTAATSPLTAVFSLSRSLLAAALLYGFCLGAIKTPWPEQHVPVLFSVFCGLLVALSYHLSRQSSDPTVLWSLIRSKLFPELEERSLETARAEPPDPLPDKMRQSVREVLHSDLVMCVVIAVLTFAISASTVFIALKSVLGFVLYALAGAVGFFTHYLLPQLRKQLPWFCLSQPVLKPLEYSQYEVRGAAQVMWFEKLYAGLQCVEKYLIYPAVVLNALTVDAHTVVSHPDKYCFYCRALLMTVAGLKLLRSAFCCPPQQYLTLAFTVLLFHFDYPRLSQGFLLDYFLMSLLCSKLWDLLYKLRFVLTYIAPWQITWGSAFHAFAQPFAVPHSAMLFVQALLSGLFSTPLNPLLGSAVFIMSYARPLKFWERDYNTKRVDHSNTRLVTQLDRNPGADDNNLNSIFYEHLTRSLQHTLCGDLVLGRWGNYGPGDCFVLASDYLNALVHLIEVGNGLVTFQLRGLEFRGTYCQQREVEAITEGVEEDEGCCCCEPGHLPRVLSFNAAFGQRWLAWEVTASKYVLEGYSISDNNAASMLQVFDLRKILITYYVKSIIYYVSRSPKLEVWLSHEGITAALRPVRVPGYADSDPTFSLSVDEDYDLRLSGLSLPSFCAVHLEWIQYCASRRSQPVDQDWNSPLVTLCFGLCVLGRRALGTASHSMSASLEPFLYGLHALFKGDFRITSPRDEWVFADMDLLHRVVAPGVRMALKLHQDHFTSPDEYEEPAALYDAIAANEERLVISHEGDPAWRSAILSNTPSLLALRHVLDDASDEYKIIMLNRRHLSFRVIKVNRECVRGLWAGQQQELVFLRNRNPERGSIQNAKQALRNMINSSCDQPLGYPIYVSPLTTSLAGSHPQLRALWGGPISLGAIAHWLLRTWERLHKGCGAGCNSGGNVDDSDCSGGGGLTSLSNNPPVAHPTPENTAGNGDQPLPPGPGWGPRSSLSGSGDGRPPPLLQWPPPRLPGPPPASPIPTEGPRTSRPPGPGLLSSEGPSGKWSLGGRKGLGGSDGEPASGSPKGGTPKSQAPLDLSLSLSLSLSPDVSTEASPPRASQDIPCLDSSAPESGTPMGALGDWPAPIEERESPAAQPLLEHQY

SEQ ID NO: 3557 - protein, 2034 aa, Homo sapiens [sequence omitted]

SEQ ID NO: 3558 - protein, 903 aa, Homo sapiens [sequence omitted]

SEQ ID NO: 3559 - protein, 1301 aa, Homo sapiens; identical to SEQ ID NO: 3556

SEQ ID NO: 3560 - protein, 127 aa, Homo sapiens
MFQAAGAAQATPSHDAKGGGSSTVQRSKSFSLRAQVKETCAACQKTVYPMERLVADKLIFHNSCFCCKHCHTKLSLGSYAALHGEFYCKPHFQQLFKSKGNYDEGFGRKQHKELWAHKEVDPGTKTA

SEQ ID NO: 3561 - protein, 98 aa, Homo sapiens
MAHEHGHEHGHHKMELPDYRQWKIEGTPLETIQKKLAAKGLRDPWGRNEAWRYMGGFAKSVSFSDVFFKGFKWGFAAFVVAVGAEYYLESLNKDKKHH

SEQ ID NO: 3562 - protein, 1198 aa, Homo sapiens
MNFEGLDPGLAEYAPAMHSALDPVLDAHLNPNLLQNVELDPEGVALEALPVQESVHIMEGVYSELHSVVAEVGVPVSVSHFDLHEEMLWVGSHGGHATSFFGPALERYSSFQVNGSDDIRQIQSLENGILFLTKNNLKYMARGGLIIFDYLLDENEDMHSLLLTDSSTLLVGGLQNHILEIDLNTVQETQKYAVETPGVTIMRQTNRFFFCGHTSGKVSLRDLRTFKVEHEFDAFSGSLSDFDVHGNLLAACGFSSRLTGLACDRFLKVYDLRMMRAITPLQVHVDPAFLRFIPTYTSRLAIISQSGQCQFCEPTGLANPADIFHVNPVGPLLMTFDVSASKQALAFGDSEGCVHLWTDSPEPSFNPYSRETEFALPCLVDSLPPLDWSQDLLPLSLIPVPLTTDTLLSDWPAANSAPAPRRAPPVDAEILRTMKKVGFIGYAPNPRTRLRNQIPYRLKESDSEFDSFSQVTESPVGREEEPHLHMVSKKYRKVTIKYSKLGLEDFDFKHYNKTLFAGLEPHIPNAYCNCMIQVLYFLEPVRCLIQNHLCQKEFCLACELGFLFHMLDLSRGDPCQGNNFLRAFRTIPEASALGLILADSDEASGKGNLARLIQRWNRFILTQLHQDMQELEIPQAYRGAGGSSFCSSGDSVIGQLFSCEMENCSLCRCGSETVRASSTLLFTLSYPDDKTGKNYDFAQVLKRSICLDQNTQAWCDTCEKYQPTIQTRNIRHLPDILVINCEVNSSKEADFWRMQAEVAFKMAVKKHGGEISKNKEFALADWKELGSPEGVLVCPSIEELKNVWLPFSIRMKMTKNKGLDVCNWTDGDEMQWGPARAEEEHGVYVYDLMATVVHILDSRTGGSLVAHIKVGETYHQRKEGVTHQQWYLFNDFLIEPIDKHEAVQFDMNWKVPAILYYVKRNLNSRYNLNIKNPIEASVLLAEASLARKQRKTHTTFIPLMLNEMPQIGDLVGLDAEFVTLNEEEAELRSDGTKSTIKPSQMSVARITCVRGQGPNEGIPFIDDYISTQEQVVDYLTQYSGIKPGDLDAKISSKHLTTLKSTYLKLRFLIDIGVKFVGHGLQKDFRVINLMVPKDQVLDTVYLFHMPRKRMISLRFLAWYFLDLKIQGETHDSIEDARTALQLYRKYLELSKNGTEPESFHKVLKGLYEKGRKMDWKVPEPEGQTSPKNAAVFSSVLAL

SEQ ID NO: 3563 - protein, 2220 aa, Homo sapiens
MIRIAALNASSTIEDDHEGSFKSHKTQTKEAQEAEAFALYHKALDLQKHDRFEESAKAYHELLEASLLREAVSSGDEKEGLKHPGLILKYSTYKNLAQLAAQREDLETAMEFYLEAVMLDSTDVNLWYKIGHVALRLIRIPLARHAFEEGLRCNPDHWPCLDNLITVLYTLSDYTTCLYFICKALEKDCRYSKGLVLKEKIFEEQPCLRKDSLRMFLKCDMSIHDVSVSAAETQAIVDEALGLRKKRQALIVREKEPDLKLVQPIPFFTWKCLGESLLAMYNHLTTCEPPRPSLGKRIDLSDYQDPSQPLESSMVVTPVNVIQPSTVSTNPAVAVAEPVVSYTSVATTSFPLHSPGLLETGAPVGDISGGDKSKKGVKRKKISEESGETAKRRSARVRNTKCKKEEKVDFQELLMKFLPSRLRKLDPEEEDDSFNNYEVQSEAKLESFPSIGPQRLSFDSATFMESEKQDVHEFLLENLTNGGILELMMRYLKAMGHKFLVRWPPGLAEVVLSVYHSWRRHSTSLPNPLLRDCSNKHIKDMMLMSLSCMELQLDQWLLTKGRSSAVSPRNCPAGMVNGRFGPDFPGTHCLGDLLQLSFASSQRDLFEDGWLEFVVRVYWLKARFLALQGDMEQALENYDICTEMLQSSTAIQVEAGAERRDIVIRLPNLHNDSVVSLEEIDKNLKSLERCQSLEEIQRLYEAGDYKAVVHLLRPTLCTSGFDRAKHLEFMTSIPERPAQLLLLQDSLLRLKDYRQCFECSDVALNEAVQQMVNSGEAAAKEEWVATVTQLLMGIEQALSADSSGSILKVSSSTTGLVRLTNNLIQVIDCSMAVQEEAKEPHVSSVLPWIILHRIIWQEEDTFHSLCHQQQLQNPAEEGMSETPMLPSSLMLLNTAHEYLGRRSWCCNSDGALLRFYVRVLQKELAASTSEDTHPYKEELETALEQCFYCLYSFPSKKSKARYLEEHSAQQVDLIWEDALFMFEYFKPKTLPEFDSYKTSTVSADLANLLKRIATIVPRTERPALSLDKVSAYIEGTSTEVPCLPEGADPSPPVVNELYYLLADYHFKNKEQSKAIKFYMHDICICPNRFDSWAGMALARASRIQDKLNSNELKSDGPIWKHATPVLNCFRRALEIDSSNLSLWIEYGTMSYALHSFASRQLKQWRGELPPELVQQMEGRRDSMLETAKHCFTSAARCEGDGDEEEWLIHYMLGKVAEKQQQPPTVYLLHYRQAGHYLHEEAARYPKKIHYHNPPELAMEALEVYFRLHASILKLLGKPDSGVGAEVLVNFMKEAAEGPFARGEEKNTPKASEKEKACLVDEDSHSSAGTLPGPGASLPSSSGPGLTSPPYTATPIDHDYVKCKKPHQQATPDDRSQDSTAVALSDSSSTQDFFNEPTSLLEGSRKSYTEKRLPILSSQAGATGKDLQGATEERGKNEESLESTEGFRAAEQGVQKPAAETPASACIPGKPSASTPTLWDGKKRGDLPGEPVAFPQGLPAGAEEQRQFLTEQCIASFRLCLSRFPQHYKSLYRLAFLYTYSKTHRNLQWARDVLLGSSIPWQQLQHMPAQGLFCERNKTNFFNGIWRIPVDEIDRPGSFAWHMNRSIVLLLKVLAQLRDHSTLLKVSSMLQRTPDQGKKYLRDADRQVLAQRAFILTVKVLEDTLSELAEGSERPGPKVCGLPGARMTTDVSHKASPEDGQEGLPQPKKPPLADGSGPGPEPGGKVGLLNHRPVAMDAGDSADQSGERKDKESPRAGPTEPMDTSEATVCHSDLERTPPLLPGRPARDRGPESRPTELSLEELSISARQQPTPLTPAQPAPAPAPATTTGTRAGGHPEEPLSRLSRKRKLLEDTESGKTLLLDAYRVWQQGQKGVAYDLGRVERIMSETYMLIKQVDEEAALEQAVKFCQVHLGAAAQRQASGDTPTTPKHPKDSRENFFPVTVVPTAPDPVPADSVQRPSDAHTKPRPALAAATTIITCPPSASASTLDQSKDPGPPRPHRPEATPSMASLGPEGEELARVAEGTSFPPQEPRHSPQVKMAPTSSPAEPHCWPAEAALGTGAEPTCSQEGKLRPEPRRDGEAQEAASETQPLSSPPTAASSKAPSSGSAQPPEGHPGKPEPSRAKSRPLPNMPKLVIPSAATKFPPEITVTPPTPTLLSPKGSISEETKQKLKSAILSAQSAANVRKESLCQPALEVLETSSQESSLESETDEDDDYMDI

SEQ ID NO: 3564 - protein, 136 aa, Homo sapiens
MEDHQHVPIDIQTSKLLDWLVDRRHCSLKWQSLVLTIREKINAAIQDMPESEEIAQLLSGSYIHYFHCLRILDLLKGTEASTKNIFGRYSSQRMKDWQEIIALYEKDNTYLGKVARPGSPGIHGEAHSQSSEIPGL

SEQ ID NO: 3565 - protein, 136 aa, Homo sapiens; identical to SEQ ID NO: 3564

SEQ ID NO: 3566 - protein, 506 aa, Homo sapiens
MEDHQHVPIDIQTSKLLDWLVDRRHCSLKWQSLVLTIREKINAAIQDMPESEEIAQLLSGSYIHYFHCLRILDLLKGTEASTKNIFGRYSSQRMKDWQEIIALYEKDNTYLVELSSLLVRNVNYEIPSLKKQIAKCQQLQQEYSRKEEECQAGAAEMREQFYHSCKQYGITGENVRGELLALVKDLPSQLAEIGAAAQQSLGEAIDVYQASVGFVCESPTEQVLPMLRFVQKRGNSTVYEWRTGTEPSVVERPHLEELPEQVAEDAIDWGDFGVEAVSEGTDSGISAEAAGIDWGIFPESDSKDPGGDGIDWGDDAVALQITVLEAGTQAPEGVARGPDALTLLEYTETRNQFLDELMELEIFLAQRAVELSEEADVLSVSQFQLAPAILQGQTKEKMVTMVSVLEDLIGKLTSLQLQHLFMILASPRYVDRVTEFLQQKLKQSQLLALKKELMVQKQQEALEEQAALEPKLDLLLEKTKELQKLIEADISKRYSGRPVNLMGTSL

SEQ ID NO: 3567 - protein, 1247 aa, Homo sapiens
MSLFLRVVFSFTMFGDLFEEEYSTVSNNQYGKGKKLKTKALEPPAPREFTNLSGIRNQGGTCYLNSLLQTLHFTPEFREALFSLGPEELGLFEDKDKPDAKVRIIPLQLQRLFAQLLLLDQEAASTADLTDSFGWTSNEEMRQHDVQELNRILFSALETSLVGTSGHDLIYRLYHGTIVNQIVCKECKNVSERQEDFLDLTVAVKNVSGLEDALWNMYVEEEVFDCDNLYHCGTCDRLVKAAKSAKLRKLPPFLTVSLLRFNFDFVKCERYKETSCYTFPLRINLKPFCEQSELDDLEYIYDLFSVIIHKGGCYGGHYHVYIKDVDHLGNWQFQEEKSKPDVNLKDLQSEEEIDHPLMILKAILLEENNLIPVDQLGQKLLKKIGISWNKKYRKQHGPLRKFLQLHSQIFLLSSDESTVRLLKNSSLQAESDFQRNDQQIFKMLPPESPGLNNSISCPHWFDINDSKVQPIREKDIEQQFQGKESAYMLFYRKSQLQRPPEARANPRYGVPCHLLNEMDAANIELQTKRAECDSANNTFELHLHLGPQYHFFNGALHPVVSQTESVWDLTFDKRKTLGDLRQSIFQLLEFWEGDMVLSVAKLVPAGLHIYQSLGGDELTLCETEIADGEDIFVWNGVEVGGVHIQTGIDCEPLLLNVLHLDTSSDGEKCCQVIESPHVFPANAEVGTVLTALAIPAGVIFINSAGCPGGEGWTAIPKEDMRKTFREQGLRNGSSILIQDSHDDNSLLTKEEKWVTSMNEIDWLHVKNLCQLESEEKQVKISATVNTMVFDIRIKAIKELKLMKELADNSCLRPIDRNGKLLCPVPDSYTLKEAELKMGSSLGLCLGKAPSSSQLFLFFAMGSDVQPGTEMEIVVEETISVRDCLKLMLKKSGLQGDAWHLRKMDWCYEAGEPLCEEDATLKELLICSGDTLLLIEGQLPPLGFLKVPIWWYQLQGPSGHWESHQDQTNCTSSWGRVWRATSSQGASGNEPAQVSLLYLGDIEISEDATLAELKSQAMTLPPFLEFGVPSPAHLRAWTVERKRPGRLLRTDRQPLREYKLGRRIEICLEPLQKGENLGPQDVLLRTQVRIPGERTYAPALDLVWNAAQGGTAGSLRQRVADFYRLPVEKIEIAKYFPEKFEWLPISSWNQQITKRKKKKKQDYLQGAPYYLKDGDTIGVKNLLIDDDDDFSTIRDDTGKEKQKQRALGRRKSQEALHEQSSYILSSAETPARPRAPETSLSIHVGSFR

SEQ ID NO: 3568 - protein, 471 aa, Homo sapiens
MSEGVDLIDIYADEEFNQDPEFNNTDQIDLYDDVLTATSQPSDDRSSSTEPPPPVRQEPSPKPNNKTPAILYTYSGLRNRRAAVYVGSFSWWTTDQQLIQVIRSIGVYDVVELKFAENRANGQSKGYAEVVVASENSVHKLLELLPGKVLNGEKVDVRPATRQNLSQFEAQARKRECVRVPRGGIPPRAHSRDSSDSADGRATPSENLVPSSARVDKPPSVLPYFNRPPSALPLMGLPPPPIPPPPPLSSSFGVPPPPPGIHYQHLMPPPPRLPPHLAVPPPGAIPPALHLNPAFFPPPNATVGPPPDTYMKASAPYNHHGSRDSGPPPSTVSEAEFEDIMKRNRAISSSAISKAVSGASAGDYSDAIETLLTAIAVIKQSRVANDERCRVLISSLKDCLHGIEAKSYSVGASGSSSRKRHRSRERSPSRSRESSRRHRDLLHNEDRHDDYFQERNREHERHRDRERDRHH

SEQ ID NO: 3569 - protein, 1437 aa, Homo sapiens
MASITQLFDDLCEALLPAAKTHLGQRSVNRKRAKRSLKKVAYNALFTNLFQDETQQLQPDMSKLPARNKILMLSFDLRVGGLGPKADRLEELVEELEAAPCCPLLEVGSVLDLLVQLAGSGPPQVLPRKRDYFLNNKHVGRNVPYSGYDCDDLSVFEMDVQSLISREECLCHSMIQETLQVMEAAPGTGLPTVGLFSFGDPCGDRFERDTRVSLFGALVHSRTYDMDVRLGLPPVPDNADLSGLAIKVPPSVDQWEDEGFQSASNLTPDSQSEPSVTPDVDLWEAALTYEASKRRCWERVGCPPGHREEPYLTEAGRDAFDKFCRLHQGELQLLAGGVLQAPQPVLVKECELVKDVLNVLIGVVSATFSLCQPAQAFVVKRGVHVSGASPESISSLLSEVAEYGTCYTRLSHFSLQPVLDSLYSKGLVFQAFTSGLRRYLQYYRACVLSTPPTLSLLTIGFLFKKLGRQLRYLAELCGVGAVLPGTCGGGPRAAFPTGVKLLSYLYQEALHNCSNEHYPVLLSLLKTSCEPYTRFIHDWVYSGVFRDAYGEFMIQVNHEYLSFRDKLYWTHGYVLISKEVEDCVPVFLKHIAHDIYVCGKTINLLKLCCPRHYLCWSDVPVPRISVIFSLEELKEIEKDCAVYVGRMERVARHSSVSKEEKELRMEIAKQELIAHAREAASRVLSALSDRQMSERMALDARKREQFQRLKEQFVKDQERRQAARQEELDDDFSYARELRDRERRLKSLEEELERKARQALVDHYSKLSAEAARREQKALWRIQRHRLESARLRFLLEDEKHIQEMLKAVSEAHQPQEPPDVLLSVHPQVTSPGPEHPEGGQGCDSGSAEQHSPAWDGWNRPGLLTPQPLKPLAVGAGGRGLQQAEGARPFSDSLSIGDFLPVGPGAEPSVQTGMVPLLEVALQTINLDLPPSAPGEAPAAASTQPSRPQEYDFSTVLRPAVATSPAPGPLQAAECSLGSSGLQLWEDSCGKMDACGSASRETLLPSHPPRRAALEEGSSQPTERLFGQVSGGGLPTGDYASEIAPTRPRWNTHGHVSDASIRVGENVSDVAPTQPRWNTHGHVSNASISLGESVSDVAPTRPRWNIHGHVSNASIRVGENVSDVAPTRPRWNTHGHVSNASIRVGENVSDVAPTRPRWNTHGHVSDASISLGESVSDMAPARPRWNTHGHVSDASISLGESVSDMAPTRPRWNTHGHVSDTSIRVGENVSDVAPIRSRCNTHGHVSDASISLGEPVSDVVSTRPRWNTHVPIPPPHMVLGALSPEAEPNTPRPQQSPPGHTSQSALSLGAQSTVLDCGPRLPVEVGPSLSSPSSGCGEGSISVGENVSDVAPTQPWWPNTPGDSVSEELGQSRVAGGQEWDCGTHRAWEVGGQWGWWHVKFPSGLLVSQDLGCCGGHGRGCLSQGRLGSVPATGTRP

SEQ ID NO: 3570 - protein, 1819 aa, Homo sapiens
MASITQLFDDLCEALLPAAKTHLGQRSVNRKRAKRSLKKVAYNALFTNLFQDETQQLQPDMSKLPARNKILMLSFDLRVGGLGPKADRLEELVEELEAAPCCPLLEVGSVLDLLVQLAGSGPPQVLPRKRDYFLNNKHVGRNVPYSGYDCDDLSVFEMDVQSLISREECLCHSMIQETLQVMEAAPGTGLPTVGLFSFGDPCGDRFERDTRVSLFGALVHSRTYDMDVRLGLPPVPDNADLSGLAIKVPPSVDQWEDEGFQSASNLTPDSQSEPSVTPDVDLWEAALTYEASKRRCWERVGCPPGHREEPYLTEAGRDAFDKFCRLHQGELQLLAGGVLQAPQPVLVKECELVKDVLNVLIGVVSATFSLCQPAQAFVVKRGVHVSGASPESISSLLSEVAEYGTCYTRLSHFSLQPVLDSLYSKGLVFQAFTSGLRRYLQYYRACVLSTPPTLSLLTIGFLFKKLGRQLRYLAELCGVGAVLPGTCGGGPRAAFPTGVKLLSYLYQEALHNCSNEHYPVLLSLLKTSCEPYTRFIHDWVYSGVFRDAYGEFMIQVNHEYLSFRDKLYWTHGYVLISKEVEDCVPVFLKHIAHDIYVCGKTINLLKLCCPRHYLCWSDVPVPRISVIFSLEELKEIEKDCAVYVGRMERVARHSSVSKEEKELRMEIAKQELIAHAREAASRVLSALSDRQMSERMALDARKREQFQRLKEQFVKDQERRQAARQEELDDDFSYARELRDRERRLKSLEEELERKARQALVDHYSKLSAEAARREQKALWRIQRHRLESARLRFLLEDEKHIQEMLKAVSEAHQPQEPPDVLLSVHPQVTSPGPEHPEGGQGCDSGSAEQHSPAWDGWNRPGLLTPQPLKPLAVGAGGRGLQQAEGARPFSDSLSIGDFLPVGPGAEPSVQTGMVPLLEVALQTINLDLPPSAPGEAPAAASTQPSRPQEYDFSTVLRPAVATSPAPGPLQAAECSLGSSGLQLWEDSCGKMDACGSASRETLLPSHPPRRAALEEGSSQPTERLFGQVSGGGLPTGDYASEIAPTRPRWNTHGHVSDASIRVGENVSDVAPTQPRWNTHGHVSNASISLGESVSDVAPTRPRWNIHGHVSNASIRVGENVSDVAPTRPRWNTHGHVSNASIRVGENVSDVAPTRPRWNTHGHVSDASISLGESVSDMAPARPRWNTHGHVSDASISLGESVSDMAPTRPRWNTHGHVSDTSIRVGENVSDVAPIRSRCNTHGHVSDASISLGEPVSDVVSTRPRWNTHVPIPPPHMVLGALSPEAEPNTPRPQQSPPGHTSQSALSLGAQSTVLDCGPRLPVEVGPSLSSPSSGCGEGSISVGENVSDVAPTQPWWPNTPGDSVSEELGPGRSGDTEDLSPNWPLNSQEDTAAQSSPGRGEEAEASAAEAQGGEQAYLAGLAGQYHLERYPDSYESMSEPPIAHLLRPVLPRAFAFPVDPQVQSAADETAVQLSELLTLPVLMKRSITAPLAAHISLVNKAAVDYFFVELHLEAHYEALRHFLLMEDGEFAQSLSDLLFEKLGAGQTPGELLNPLVLNSVLSKALQCSLHGDTPHASNLSLALKYLPEVFAPNAPDVLSCLELRYKVDWPLNIVITEGCLSKYSGVFSFLLQLKLMMWALKDVCFHLKRTALLSHMAGSVQFRQLQLFKHEMQHFVKVIQGYIANQILHVTWCEFRARLATVGDLEEIQRAHAEYLHKAVFRGLLTEKAAPVMNVIHSIFSLVLKFRSQLISQAWGPPGGPRGAEHPNFALMQQSYNTFKYYSHFLFKVVTKLVNRGYQPHLEDFLLRINFNNYYQDA

SEQ ID NO: 3571 - protein, 251 aa, Homo sapiens
MEPGEELEEEGSPGGREDGFTAEHLAAEAMAADMDPWLVFDARTTPATELDAWLAKYPPSQVTRYGDPGSPNSEPVGWIAVYGQGYSPNSGDVQGLQAAWEALQTSGRPITPGTLRQLAITHHVLSGKWLMHLAPGFKLDHAWAGIARAVVEGRLQVAKVSPRAKEGGRQVICVYTDDFTDRLGVLEADSAIRAAGIKCLLTYKPDVYTYLGIYRANRWHLCPTLYESRFQLGGSARGSRVLDRANNVELT

SEQ ID NO: 3572 - protein, 927 aa, Homo sapiens
MGTQDPGNMGTGVPASEQISCAKEDPQVYCPEETGGTKDVQVTDCKSPEDSRPPKETDCCNPEDSGQLMVSYEGKAMGYQVPPFGWRICLAHEFTEKRKPFQANNVSLSNMIKHIGMGLRYLQWWYRKTHVEKKTPFIDMINSVPLRQIYGCPLGGIGGGTITRGWRGQFCRWQLNPGMYQHRTVIADQFTVCLRREGQTVYQQVLSLERPSVLRSWNWGLCGYFAFYHALYPRAWTVYQLPGQNVTLTCRQITPILPHDYQDSSLPVGVFVWDVENEGDEALDVSIMFSMRNGLGGGDDAPGGLWNEPFCLERSGETVRGLLLHHPTLPNPYTMAVAARVTAATTVTHITAFDPDSTGQQVWQDLLQDGQLDSPTGQSTPTQKGVGIAGAVCVSSKLRPRGQCRLEFSLAWDMPRIMFGAKGQVHYRRYTRFFGQDGDAAPALSHYALCRYAEWEERISAWQSPVLDDRSLPAWYKSALFNELYFLADGGTVWLEVLEDSLPEELGRNMCHLRPTLRDYGRFGYLEGQEYRMYNTYDVHFYASFALIMLWPKLELSLQYDMALATLREDLTRRRYLMSGVMAPVKRRNVIPHDIGDPDDEPWLRVNAYLIHDTADWKDLNLKFVLQVYRDYYLTGDQNFLKDMWPVCLAVMESEMKFDKDHDGLIENGGYADQTYDGWVTTGPSAYCGGLWLAAVAVMVQMAALCGAQDIQDKFSSILSRGQEAYERLLWNGRYYNYDSSSRPQSRSVMSDQCAGQWFLKACGLGEGDTEVFPTQHVVRALQTIFELNVQAFAGGAMGAVNGMQPHGVPDKSSVQSDEVWVGVVYGLAATMIQEGLTWEGFQTAEGCYRTVWERLGLAFQTPEAYCQQRVFRSLAYMRPLSIWAMQLALQQQQHKKASWPKVKQGTGLRTGPMFGPKEAMANLSPE

SEQ ID NO: 3573 - protein, 560 aa, Homo sapiens
MLWTPAPPDLTLGEGEEARTWDFLTAVGGSQAEAQACLTEALQLQARGALYTAHAQAWAQLWVECGLDVVGPLQLRQALRGSLYYLLSALPQPKAPGYICHGLSPGGLSNGSREECYWGHVFWDQDLWMFPSILMFHPEAARAILEYRIRTLDGALENAQNLGYQGAKFAWESADSGLEVCPEDIYGVQEVHVNGAVVLAFELYYHTTQDLQLFREAGGWDVVRAVAEFWCSRVEWSPREEKYHLRGVMSPDEYHSGVNNSVYTNVLVQNSLRFAAALAQDLGLPIPSQWLAVADKIKVPFDVEQNFHPEFDGYEPGEVVKQADVVLLGYPVPFSLSPDVRRKNLEIYEAVTSPQGPAMTWSMFAVGWMELKDAVRARGLLDRSFANMAEPFKVWTENADGSGAVNFLTGMGGFLQAVVFGCTGFRVTRAGVTFDPVCLSGISRVSVSGIFYQGNKLNFSFSEDSVTVEVTARAGPWAPHLEAELWPSQSRLSLLPGHKVSFPRSAGRIQMSPPKLPGSSSSEFPGRTFSDVRDPLQSPLWVTLGSSSPTESLTVDPASE

SEQ ID NO: 3574 - protein, 227 aa, Homo sapiens
MAGVGAGPLRAMGRQALLLLALCATGAQGLYFHIGETEKRCFIEEIPDETMVIGNYRTQMWDKQKEVFLPSTPGLGMHVEVKDPDGKVVLSRQYGSEGRFTFTSHTPGDHQICLHSNSTRMALFAGGKLRVHLDIQVGEHANNYPEIAAKDKLTELQLRARQLLDQVEQIQKEQDYQRYREERFRLTSESTNQRVLWWSIAQTVILILTGIWQMRHLKSFFEAKKLV

SEQ ID NO: 3575 - protein, 1390 aa, Homo sapiens
MVKEQFRETDVAKKISHICFGMKSPEEMRQQAHIQVVSKNLYSQDNQHAPLLYGVLDHRMGTSEKDRPCETCGKNLADCLGHYGYIDLELPCFHVGYFRAVIGILQMICKTCCHIMLSQEEKKQFLDYLKRPGLTYLQKRGLKKKISDKCRKKNICHHCGAFNGTVKKCGLLKIIHEKYKTNKKVVDPIVSNFLQSFETAIEHNKEVEPLLGRAQENLNPLVVLNLFKRIPAEDVPLLLMNPEAGKPSDLILTRLLVPPLCIRPSVVSDLKSGTNEDDLTMKLTEIIFLNDVIKKHRISGAKTQMIMEDWDFLQLQCALYINSELSGIPLNMAPKKWTRGFVQRLKGKQGRFRGNLSGKRVDFSGRTVISPDPNLRIDEVAVPVHVAKILTFPEKVNKANINFLRKLVQNGPEVHPGANFIQQRHTQMKRFLKYGNREKMAQELKYGDIVERHLIDGDVVLFNRQPSLHKLSIMAHLARVKPHRTFRFNECVCTPYNADFDGDEMNLHLPQTEEAKAEALVLMGTKANLVTPRNGEPLIAAIQDFLTGAYLLTLKDTFFDRAKACQIIASILVGKDEKIKVRLPPPTILKPVTLWTGKQIFSVILRPSDDNPVRANLRTKGKQYCGKGEDLCANDSYVTIQNSELMSGSMDKGTLGSGSKNNIFYILLRDWGQNEAADAMSRLARLAPVYLSNRGFSIGIGDVTPGQGLLKAKYELLNAGYKKCDEYIEALNTGKLQQQPGCTAEETLEALILKELSVIRDHAGSACLRELDKSNSPLTMALCGSKGSFINISQMIACVGQQAISGSRVPDGFENRSLPHFEKHSKLPAAKGFVANSFYSGLTPTEFFFHTMAGREGLVDTAVKTAETGYMQRRLVKSLEDLCSQYDLTVRSSTGDIIQFIYGGDGLDPAAMEGKDEPLEFKRVLDNIKAVFPCPSEPALSKNELILTTESIMKKSEFLCCQDSFLQEIKKFIKGVSEKIKKTRDKYGINDNGTTEPRVLYQLDRITPTQVEKFLETCRDKYMRAQMEPGSAVGALCAQSIGEPGTQMTLKTFHFAGVASMNITLGVPRIKEIINASKAISTPIITAQLDKDDDADYARLVKGRIEKTLLGEISEYIEEVFLPDDCFILVKLSLERIRLLRLEVNAETVRYSICTSKLRVKPGDVAVHGEAVVCVTPRENSKSSMYYVLQFLKEDLPKVVVQGIPEVSRAVIHIDEQSGKEKYKLLVEGDNLRAVMATHGVKGTRTTSNNTYEVEKTLGIEAARTTIINEIQYTMVNHGMSIDRRHVMLLSDLMTYKGEVLGITRFGLAKMKESVLMLASFEKTADHLFDAAYFGQKDSVCGVSECIIMGIPMNIGTGLFKLLHKADRDPNPPKRPLIFDTNEFHIPLVT

SEQ ID NO: 3576 - protein, 459 aa, Homo sapiens
MTILGTTFGMVFSLLQVVSGESGYAQNGDLEDAELDDYSFSCYSQLEVNGSQHSLTCAFEDPDVNITNLEFEICGALVEVKCLNFRKLQEIYFIETKKFLLIGKSNICVKVGEKSLTCKKIDLTTIVKPEAPFDLSVVYREGANDFVVTFNTSHLQKKYVKVLMHDVAYRQEKDENKWTHVNLSSTKLTLLQRKLQPAAMYEIKVRSIPDHYFKGFWSEWSPSYYFRTPEINNSSGEMDPILLTISILSFFSVALLVILACVLWKKRIKPIVWPSLPDHKKTLEHLCKKPRKNLNVSFNPESFLDCQIHRVDDIQARDEVEGFLQDTFPQQLEESEKQRLGGDVQSPNCPSEDVVITPESFGRDSSLTCLAGNVSACDAPILSSSRSLDCRESGKNGPHVYQDLLLSLGTTNSTLPPPFSLQSGILTLNPVAQGQPILTSLGSNQEEAYVTMSSFYQNQ

SEQ ID NO: 3577 - protein, 2035 aa, Homo sapiens
MDLRPELPTTLGPVSLRQLGLEHTRYPCLDLGAMLLYTLTFWLLLRQFVKEKLLKWAESPAALTEVTVADTEPTRTQTLLQSLGELVKGVYAKYWIYVCAGMFIVVSFAGRLVVYKIVYMFLFLLCLTLFQVYYSLWRKLLKAFWWLVVAYTMLVLIAVYTFQFQDFPAYWRNLTGFTDEQLGDLGLEQFSVSELFSSILVPGFFLLACILQLHYFHRPFMQLTDMEHVSLPGTRLPRWAHRQDAVSGTPLLREEQQEHQQQQQEEEEEEDSRDEGLGVATPHQATQVPEGAAKWGLVAERLLELAAGFSDVLSRVQVFLRRLLELHVFKLVALYTVWVALKEVSVMNLLLVVLWAFALPYPRFRPMASCLSTVWTCVIIVCKMLYQLKVVNPQEYSSNCTEPFPNSTNLLPTEISQSLLYRGPVDPANWFGVRKGFPNLGYIQNHLQVLLLLVFEAIVYRRQEHYRRQHQLAPLPAQAVFASGTRQQLDQDLLGCLKYFINFFFYKFGLEICFLMAVNVIGQRMNFLVTLHGCWLVAILTRRHRQAIARLWPNYCLFLALFLLYQYLLCLGMPPALCIDYPWRWSRAVPMNSALIKWLYLPDFFRAPNSTNLISDFLLLLCASQQWQVFSAERTEEWQRMAGVNTDRLEPLRGEPNPVPNFIHCRSYLDMLKVAVFRYLFWLVLVVVFVTGATRISIFGLGYLLACFYLLLFGTALLQRDTRARLVLWDCLILYNVTVIISKNMLSLLACVFVEQMQTGFCWVIQLFSLVCTVKGYYDPKEMMDRDQDCLLPVEEAGIIWDSVCFFFLLLQRRVFLSHYYLHVRADLQATALLASRGFALYNAANLKSIDFHRRIEEKSLAQLKRQMERIRAKQEKHRQGRVDRSRPQDTLGPKDPGLEPGPDSPGGSSPPRRQWWRPWLDHATVIHSGDYFLFESDSEEEEEAVPEDPRPSAQSAFQLAYQAWVTNAQAVLRRRQQEQEQARQEQAGQLPTGGGPSQEVEPAEGPEEAAAGRSHVVQRVLSTAQFLWMLGQALVDELTRWLQEFTRHHGTMSDVLRAERYLLTQELLQGGEVHRGVLDQLYTSQAEATLPGPTEAPNAPSTVSSGLGAEEPLSSMTDDMGSPLSTGYHTRSGSEEAVTDPGEREAGASLYQGLMRTASELLLDRRLRIPELEEAELFAEGQGRALRLLRAVYQCVAAHSELLCYFIIILNHMVTASAGSLVLPVLVFLWAMLSIPRPSKRFWMTAIVFTEIAVVVKYLFQFGFFPWNSHVVLRRYENKPYFPPRILGLEKTDGYIKYDLVQLMALFFHRSQLLCYGLWDHEEDSPSKEHDKSGEEEQGAEEGPGVPAATTEDHIQVEARVGPTDGTPEPQVELRPRDTRRISLRFRRRKKEGPARKGAAAIEAEDREEEEGEEEKEAPTGREKRPSRSGGRVRAAGRRLQGFCLSLAQGTYRPLRRFFHDILHTKYRAATDVYALMFLADVVDFIIIIFGFWAFGKHSAATDITSSLSDDQVPEAFLVMLLIQFSTMVVDRALYLRKTVLGKLAFQVALVLAIHLWMFFILPAVTERMFNQNVVAQLWYFVKCIYFALSAYQIRCGYPTRILGNFLTKKYNHLNLFLFQGFRLVPFLVELRAVMDWVWTDTTLSLSSWMCVEDIYANIFIIKCSRETEKKYPQPKGQKKKKIVKYGMGGLIILFLIAIIWFPLLFMSLVRSVVGVVNQPIDVTVTLKLGGYEPLFTMSAQQPSIIPFTAQAYEELSRQFDPQPLAMQFISQYSPEDIVTAQIEGSSGALWRISPPSRAQMKRELYNGTADITLRFTWNFQRDLAKGGTVEYANEKHMLALAPNSTARRQLASLLEGTSDQSVVIPNLFPKYIRAPNGPEANPVKQLQPNEEADYLGVRIQLRREQGAGATGFLEWWVIELQECRTDCNLLPMVIFSDKVSPPSLGFLAGYGIMGLYVSIVLVIGKFVRGFFSEISHSIMFEELPCVDRILKLCQDIFLVRETRELELEEELYAKLIFLYRSPETMIKWTREKE

SEQ ID NO: 3578 - protein, 619 aa, Homo sapiens
MAGPGVPGAPAARWKRHIVRQLRLRDRTQKALFLELVPAYNHLLEKAELLDKFSKKLQPEPNSVTPTTHQGPWEESELDSDQVPSLVALRVKWQEEEEGLRLVCGEMAYQVVEKGAALGTLESELQQRQSRLAALEARVAQLREARAQQAQQVEEWRAQNAVQRAAYEALRAHVGLREAALRRLQEEARDLLERLVQRKARAAAERNLRNERRERAKQARVSQELKKAAKRTVSISEGPDTLGDGMRERRETLALAPEPEPLEKEACEKWKRPFRSASATSLTLSHCVDVVKGLLDFKKRRGHSIGGAPEQRYQIIPVCVAARLPTRAQDVLDAHLSEVNAVRFGPNSSLLATGGADRLIHLWNVVGSRLEANQTLEGAGGSITSVDFDPSGYQVLAATYNQAAQLWKVGEAQSKETLSGHKDKVTAAKFKLTRHQAVTGSRDRTVKEWDLGRAYCSRTINVLSYCNDVVCGDHIIISGHNDQKIRFWDSRGPHCTQVIPVQGRVTSLSLSHDQLHLLSCSRDNTLKVIDLRVSNIRQVFRADGFKCGSDWTKAVFSPDRSYALAGSCDGALYIWDVDTGKLESRLQGPHCAAVNAVAWCYSGSHMVSVDQGRKVVLWQ

SEQ ID NO: 3579 - protein, 1922 aa, Homo sapiens
MKSPALQPLSMAGLQLMTPASSPMGPFFGLPWQQEAIHDNIYTPRKYQVELLEAALDHNTIVCLNTGSGKTFIAVLLTKELSYQIRGDFSRNGKRTVFLVNSANQVAQQVSAVRTHSDLKVGEYSNLEVNASWTKERWNQEFTKHQVLIMTCYVALNVLKNGYLSLSDINLLVFDECHLAILDHPYREIMKLCENCPSCPRILGLTASILNGKCDPEELEEKIQKLEKILKSNAETATDLVVLDRYTSQPCEIVVDCGPFTDRSGLYERLLMELEEALNFINDCNISVHSKERDSTLISKQILSDCRAVLVVLGPWCADKVAGMMVRELQKYIKHEQEELHRKFLLFTDTFLRKIHALCEEHFSPASLDLKFVTPKVIKLLEILRKYKPYERQQFESVEWYNNRNQDNYVSWSDSEDDDEDEEIEEKEKPETNFPSPFTNILCGIIFVERRYTAVVLNRLIKEAGKQDPELAYISSNFITGHGIGKNQPRNKQMEAEFRKQEEVLRKFRAHETNLLIATSIVEEGVDIPKCNLVVRFDLPTEYRSYVQSKGRARAPISNYIMLADTDKIKSFEEDLKTYKAIEKILRNKCSKSVDTGETDIDPVMDDDDVFPPYVLRPDDGGPRVTINTAIGHINRYCARLPSDPFTHLAPKCRTRELPDGTFYSTLYLPINSPLRASIVGPPMSCVRLAERVVALICCEKLHKIGELDDHLMPVGKETVKYEEELDLHDEEETSVPGRPGSTKRRQCYPKAIPECLRDSYPRPDQPCYLYVIGMVLTTPLPDELNFRRRKLYPPEDTTRCFGILTAKPIPQIPHFPVYTRSGEVTISIELKKSGFMLSLQMLELITRLHQYIFSHILRLEKPALEFKPTDADSAYCVLPLNVVNDSSTLDIDFKFMEDIEKSEARIGIPSTKYTKETPFVFKLEDYQDAVIIPRYRNFDQPHRFYVADVYTDLTPLSKFPSPEYETFAEYYKTKYNLDLTNLNQPLLDVDHTSSRLNLLTPRHLNQKGKALPLSSAEKRKAKWESLQNKQILVPELCAIHPIPASLWRKAVCLPSILYRLHCLLTAEELRAQTASDAGVGVRSLPADFRYPNLDFGWKKSIDSKSFISISNSSSAENDNYCKHSTIVPENAAHQGANRTSSLENHDQMSVNCRTLLSESPGKLHVEVSADLTAINGLSYNQNLANGSYDLANRDFCQGNQLNYYKQEIPVQPTTSYSIQNLYSYENQPQPSDECTLLSNKYLDGNANKSTSDGSPVMAVMPGTTDTIQVLKGRMDSEQSPSIGYSSRTLGPNPGLILQALTLSNASDGFNLERLEMLGDSFLKHAITTYLFCTYPDAHEGRLSYMRSKKVSNCNLYRLGKKKGLPSRMVVSIFDPPVNWLPPGYVVNQDKSNTDKWEKDEMTKDCMLANGKLDEDYEEEDEEEESLMWRAPKEEADYEDDFLEYDQEHIRFIDNMLMGSGAFVKKISLSPFSTTDSAYEWKMPKKSSLGSMPFSSDFEDFDYSSWDAMCYLDPSKAVEEDDFVVGFWNPSEENCGVDTGKQSISYDLHTEQCIADKSIADCVEALLGCYLTSCGERAAQLFLCSLGLKVLPVIKRTDREKALCPTRENFNSQQKNLSVSCAAASVASSRSSVLKDSEYGCLKIPPRCMFDHPDADKTLNHLISGFENFEKKINYRFKNKAYLLQAFTHASYHYNTITDCYQRLEFLGDAILDYLITKHLYEDPRQHSPGVLTDLRSALVNNTIFASLAVKYDYHKYFKAVSPELFHVIDDFVQFQLEKNEMQGMDSELRRSEEDEEKEEDIEVPKAMGDIFESLAGAIYMDSGMSLETVWQVYYPMMRPLIEKFSANVPRSPVRELLEMEPETAKFSPAERTYDGKVRVTVEVVGKGKFKGVGRSYRIAKSAAARRALRSLKANQPQVPNS

SEQ ID NO: 3580 - protein, 1922 aa, Homo sapiens; identical to SEQ ID NO: 3579

SEQ ID NO: 3581 - protein, 185 aa, Homo sapiens
MRERFDRFLHEKNCMTDLLAKLEAKTGVNRSFIALGVIGLVALYLVFGYGASLLCNLIGFGYPAYISIKAIESPNKEDDTQWLTYWVVYGVFSIAEFFSDIFLSWFPFYYMLKCGFLLWCMAPSPSNGAELLYKRIIRPFFLKHESQMDSVVKDLKDKAKETADAITKEAKKATVNLLGEEKKST

SEQ ID NO: 3582 - protein, 376 aa, Homo sapiens
MADYWKSQPKKFCDYCKCWIADNRPSVEFHERGKNHKENVAKRISEIKQKSLDKAKEEEKASKEFAAMEAAALKAYQEDLKRLGLESEILEPSITPVTSTIPPTSTSNQQKEKKEKKKRKKDPSKGRWVEGITSEGYHYYYDLISGASQWEKPEGFQGDLKKTAVKTVWVEGLSEDGFTYYYNTETGESRWEKPDDFIPHTSDLPSSKVNENSLGTLDESKSSDSHSDSDGEQEAEEGGVSTETEKPKIKFKEKNKNSDGGSDPETQKEKSIQKQNSLGSNEEKSKTLKKSNPYGEWQEIKQEVESHEEVDLELPSTENEYVSTSEADGGGEPKVVFKEKTVTSLGVMADGVAPVFKKRRTENGKSRNLRQRGDDQ

SEQ ID NO: 3583 - protein, 231 aa, Homo sapiens
MCGNTMSVPLLTDAATVSGAERETAAVIFLHGLGDTGHSWADALSTIRLPHVKYICPHAPRIPVTLNMKMVMPSWFDLMGLSPDAPEDEAGIKKAAENIKALIEHEMKNGIPANRIVLGGFSQGGALSLYTALTCPHPLAGIVALSCWLPLHRAFPQAANGSAKDLAILQCHGELDPMVPVRFGALTAEKLRSVVTPARVQFKTYPGVMHSSCPQEMAAVKEFLEKLLPPV

SEQ ID NO: 3584 - protein, 1136 aa, Homo sapiens
MFSRKKRELMKTPSISKKNRAGSPSPQPSGELPRKDGADAVFPGPSLEPPAGSSGVKATGTLKRPTSLSRHASAAGFPLSGAASWTLGRSHRSPLTAASPGELPTEGAGPDVVEDISHLLADVARFAEGLEKLKECVLRDDLLEARRPRAHECLGEALRVMHQIISKYPLLNTVETLTAAGTLIAKVKAFHYESNNDLEKQEFEKALETIAVAFSSTVSEFLMGEVDSSTLLAVPPGDSSQSMESLYGPGSEGTPPSLEDCDAGCLPAEEVDVLLQRCEGGVDAALLYAKNMAKYMKDLISYLEKRTTLEMEFAKGLQKIAHNCRQSVMQEPHMPLLSIYSLALEQDLEFGHSMVQAVGTLQTQTFMQPLTLRRLEHEKRRKEIKEAWHRAQRKLQEAESNLRKAKQGYVQRCEDHDKARFLVAKAEEEQAGSAPGAGSTATKTLDKRRRLEEEAKNKAEEAMATYRTCVADAKTQKQELEDTKVTALRQIQEVIRQSDQTIKSATISYYQMMHMQTAPLPVHFQMLCESSKLYDPGQQYASHVRQLQRDQEPDVHYDFEPHVSANAWSPVMRARKSSFNVSDVARPEAAGSPPEEGGCTEGTPAKDHRAGRGHQVHKSWPLSISDSDSGLDPGPGAGDFKKFERTSSSGTMSSTEELVDPDGGAGASAFEQADLNGMTPELPVAVPSGPFRHEGLSKAARTHRLRKLRTPAKCRECNSYVYFQGAECEECCLACHKKCLETLAIQCGHKKLQGRLQLFGQDFSHAARSAPDGVPFIVKKCVCEIERRALRTKGIYRVNGVKTRVEKLCQAFENGKELVELSQASPHDISNVLKLYLRQLPEPLISFRLYHELVGLAKDSLKAEAEAKAASRGRQDGSESEAVAVALAGRLRELLRDLPPENRASLQYLLRHLRRIVEVEQDNKMTPGNLGIVFGPTLLRPRPTEATVSLSSLVDYPHQARVIETLIVHYGLVFEEEPEETPGGQDESSNQRAEVVVQVPYLEAGEAVVYPLQEAAADGCRESRVVSNDSDSDLEEASELLSSSEASALGHLSFLEQQQSEASLEVASGSHSGSEEQLEATAREDGDGDEDGPAQQLSGFNTNQSNNVLQAPLPPMRLRGGRMTLGSCRERQPEFV

SEQ ID NO: 3585 - protein, 51 aa, Homo sapiens
MVAYWRQAGLSYIRYSQICAKAVRDALKTEFKANAEKTSGSNVKIVKVKKE

SEQ ID NO: 3586 - protein, 51 aa, Homo sapiens; identical to SEQ ID NO: 3585

SEQ ID NO: 3587 - protein, 70 aa, Homo sapiens
MWFEILPGLSVMGVCLLIPGLATAYIHRFTNGGKEKRVAHFGYHWSLMERDRRISGVDRYYVSKGLENID

SEQ ID NO: 3588 - protein, 1887 aa, Homo sapiens
MAARGRGLLLLTLSVLLAAGPSAAAAKLNIPKVLLPFTRATRVNFTLEASEGCYRWLSTRPEVASIEPLGLDEQQCSQKAVVQARLTQPARLTSIIFAEDITTGQVLRCDAIVDLIHDIQIVSTTRELYLEDSPLELKIQALDSEGNTFSTLAGLVFEWTIVKDSEADRFSDSHNALRILTFLESTYIPPSYISEMEKAAKQGDTILVSGMKTGSSKLKARIQEAVYKNVRPAEVRLLILENILLNPAYDVYLMVGTSIHYKVQKIRQGKITELSMPSDQYELQLQNSIPGPEGDPARPVAVLAQDTSMVTALQLGQSSLVLGHRSIRMQGASRLPNSTIYVVEPGYLGFTVHPGDRWVLETGRLYEITIEVFDKFSNKVYVSDNIRIETVLPAEFFEVLSSSQNGSYHRIRALKRGQTAIDAALTSVVDQDGGVHILQVPVWNQQEVEIHIPITLYPSILTFPWQPKTGAYQYTIRAHGGSGNFSWSSSSHLVATVTVKGVMTTGSDIGFSVIQAHDVQNPLHFGEMKVYVIEPHSMEFAPCQVEARVGQALELPLRISGLMPGGASEVVTLSDCSHFDLAVEVENQGVFQPLPGRLPPGSEHCSGIRVKAEAQGSTTLLVSYRHGHVHLSAKITIAAYLPLKAVDPSSVALVTLGSSKEMLFEGGPRPWILEPSKFFQNVTAEDTDSIGLALFAPHSSRNYQQHWILVTCQALGEQVIALSVGNKPSLTNPFPAVEPAVVKFVCAPPSRLTLAPVYTSPQLDMSCPLLQQNKQVVPVSSHRNPRLDLAAYDQEGRRFDNFSSLSIQWESTRPVLASIEPELPMQLVSQDDESGQKKLHGLQAILVHEASGTTAITATATGYQESHLSSARTKQPHDPLVPLSASIELILVEDVRVSPEEVTIYNHPGIQAELRIREGSGYFFLNTSTADVVKVAYQEARGVAMVHPLLPGSSTIMIHDLCLVFPAPAKAVVYVSDIQELYIRVVDKVEIGKTVKAYVRVLDLHKKPFLAKYFPFMDLKLRAASPIITLVALDEALDNYTITFLIRGVAIGQTSLTASVTNKAGQRINSAPQQIEVFPPFRLMPRKVTLLIGATMQVTSEGGPQPQSNILFSISNESVALVSAAGLVQGLAIGNGTVSGLVQAVDAETGKVVIISQDLVQVEVLLLRAVRIRAPIMRMRTGTQMPIYVTGITNHQNPFSFGNAVPGLTFHWSVTKRDVLDLRGRHHEASIRLPSQYNFAMNVLGRVKGRTGLRVVVKAVDPTSGQLYGLARELSDEIQVQVFEKLQLLNPEIEAEQILMSPNSYIKLQTNRDGAASLSYRVLDGPEKVPVVHVDEKGFLASGSMIGTSTIEVIAQEPFGANQTIIVAVKVSPVSYLRVSMSPVLHTQNKEALVAVPLGMTVTFTVHFHDNSGDVFHAHSSVLNFATNRDDFVQIGKGPTNNTCVVRTVSVGLTLLRVWDAEHPGLSDFMPLPVLQAISPELSGAMVVGDVLCLATVLTSLEGLSGTWSSSANSILHIDPKTGVAVARAVGSVTVYYEVAGHLRTYKEVVVSVPQRIMARHLHPIQTSFQEATASKVIVAVGDRSSNLRGECTPTQREVIQALHPETLISCQSQFKPAVFDFPSQDVFTVEPQFDTALGQYFCSITMHRLTDKQRKHLSMKKTALVVSASLSSSHFSTEQVGAEVPFSPGLFADQAEILLSNHYTSSEIRVFGAPEVLENLEVKSGSPAVLAFAKEKSFGWPSFITYTVGVLDPAAGSQGPLSTTLTFSSPVTNQAIAIPVTVAFVVDRRGPGPYGASLFQHFLDSYQVMFFTLFALLAGTAVMIIAYHTVCTPRDLAVPAALTPRASPGHSPHYFAASSPTSPNALPPARKASPPSGLWSPAYASH

SEQ ID NO: 3589 - protein, 108 aa, Homo sapiens
MILQRLFRFSSVIRSAVSVHLRRNIGVTAVAFNKELDPIQKLFVDKIREYKSKRQTSGGPVDASSEYQQELERELFKLKQMFGNADMNTFPTFKFEDPKFEVIEKPQA

SEQ ID NO: 3590 - protein, 108 aa, Homo sapiens; identical to SEQ ID NO: 3589

SEQ ID NO: 3591 - protein, 116 aa, Homo sapiens
MHCDGGISMILQRLFRFSSVIRSAVSVHLRRNIGVTAVAFNKELDPIQKLFVDKIREYKSKRQTSGGPVDASSEYQQELERELFKLKQMFGNADMNTFPTFKFEDPKFEVIEKPQA

SEQ ID NO: 3592 - protein, 108 aa, Homo sapiens; identical to SEQ ID NO: 3589

SEQ ID NO: 3593 - protein, 108 aa, Homo sapiens; identical to SEQ ID NO: 3589

SEQ ID NO: 3594 - protein, 198 aa, Homo sapiens
MSFIFEWIYNGFSSVLQFLGLYKKSGKLVFLGLDNAGKTTLLHMLKDDRLGQHVPTLHPTSEELTIAGMTFTTFDLGGHEQARRVWKNYLPAINGIVFLVDCADHSRLVESKVELNALMTDETISNVPILILGNKIDRTDAISEEKLREIFGLYGQTTGKGNVTLKELNARPMEVFMCSVLKRQGYGEGFRWLSQYID

SEQ ID NO: 3595 - protein, 556 aa, Homo sapiens
MPPPRLLFFLLFLTPMEVRPEEPLVVKVEEGDNAVLQCLKGTSDGPTQQLTWSRESPLKPFLKLSLGLPGLGIHMRPLAIWLFIFNVSQQMGGFYLCQPGPPSEKAWQPGWTVNVEGSGELFRWNVSDLGGLGCGLKNRSSEGPSSPSGKLMSPKLYVWAKDRPEIWEGEPPCVPPRDSLNQSLSQDLTMAPGSTLWLSCGVPPDSVSRGPLSWTHVHPKGPKSLLSLELKDDRPARDMWVMETGLLLPRATAQDAGKYYCHRGNLTMSFHLEITARPVLWHWLLRTGGWKVSAVTLAYLIFCLCSLVGILHLQRALVLRRKRKRMTDPTRRFFKVTPPPGSGPQNQYGNVLSLPTPTSGLGRAQRWAAGLGGTAPSYGNPSSDVQADGALGSRSPPGVGPEEEEGEGYEEPDSEEDSEFYENDSNLGQDQLSQDGSGYENPEDEPLGPEDEDSFSNAESYENEDEELTQPVARTMDFLSPHGSAWDPSREATSLGSQSYEDMRGILYAAPQLRSIRGQPGPNHEEDADSYENMDNPDGPDPAWGGGGRMGTWSTR

SEQ ID NO: 3596 - protein, 378 aa, Homo sapiens
MVDYSVWDHIEVSDDEDETHPNIDTASLFRWRHQARVERMEQFQKEKEELDRGCRECKRKVAECQRKLKELEVAEGGKAELERLQAEAQQLRKEERSWEQKLEEMRKKEKSMPWNVDTLSKDGFSKSMVNTKPEKTEEDSEEVREQKHKTFVEKYEKQIKHFGMLRRWDDSQKYLSDNVHLVCEETANYLVIWCIDLEVEEKCALMEQVAHQTIVMQFILELAKSLKVDPRACFRQFFTKIKTADRQYMEGFNDELEAFKERVRGRAKLRIEKAMKEYEEEERKKRLGPGGLDPVEVYESLPEELQKCFDVKDVQMLQDAISKMDPTDAKYHMQRCIDSGLWVPNSKASEAKEGEEAGPGDPLLEAVPKTGDEKDVSV

SEQ ID NO: 3597 - protein, 437 aa, Homo sapiens
MAGGPPKALPSTGPHSLRDMPHPLAGSSSEEAVGGDSTPSPDLLMARSFGDKDLILPNGGTPAGTSSPASSSSLLNRLQLDDDIDGETRDLFVIVDDPKKHVCTMETYITYRITTKSTRVEFDLPEYSVRRRYQDFDWLRSKLEESQPTHLIPPLPEKFVVKGVVDRFSEEFVETRRKALDKFLKRITDHPVLSFNEHFNIFLTAKDLNAYKKQGIALLTRMGESVKHVTGGYKLRTRPLEFAAIGDYLDTFALKLGTIDRIAQRIIKEEIEYLVELREYGPVYSTWSALEGELAEPLEGVSACIGNCSTALEELTDDMTEDFLPVLREYILYSDSMKSVLKKRDQVQAEYEAKLEAVALRKEDRPKVPADVEKCQDRMECFNADLKADMERWQNNKRQDFRQLLMGMADKNIQYYEKCLMAWESIIPLLQEKQEAK

SEQ ID NO: 3598 - protein, 119 aa, Homo sapiens
MTEDFLPVLREYILYSDSMKSVLKKRDQVQAEYEAKLEAVALRKEDRPKVPADVEKCQDRMECFNADLKADMERWQNNKRQDFRQLLMGMADKNIQYYEKCLMAWESIIPLLQEKQEAK

SEQ ID NO: 3599 - protein, 437 aa, Homo sapiens; identical to SEQ ID NO: 3597

SEQ ID NO: 3600 - protein, 119 aa, Homo sapiens; identical to SEQ ID NO: 3598

SEQ ID NO: 3601 - protein, 480 aa, Homo sapiens
MSAEVIHQVEEALDTDEKEMLLFLCRDVAIDVVPPNVRDLLDILRERGKLSVGDLAELLYRVRRFDLLKRILKMDRKAVETHLLRNPHLVSDYRVLMAEIGEDLDKSDVSSLIFLMKDYMGRGKISKEKSFLDLVVELEKLNLVAPDQLDLLEKCLKNIHRIDLKTKIQKYKQSVQGAGTSYRNVLQAAIQKSLKDPSNNFRLHNGRSKEQRLKEQLGAQQEPVKKSIQESEAFLPQSIPEERYKMKSKPLGICLIIDCIGNETELLRDTFTSLGYEVQKFLHLSMHGISQILGQFACMPEHRDYDSFVCVLVSRGGSQSVYGVDQTHSGLPLHHIRRMFMGDSCPYLAGKPKMFFIQNYVVSEGQLENSSLLEVDGPAMKNVEFKAQKRGLCTVHREADFFWSLCTADMSLLEQSHSSPSLYLQCLSQKLRQERKRPLLDLHIELNGYMYDWNSRVSAKEKYYVWLQHTLRKKLILSYT

SEQ ID NO: 3602 - protein, 72 aa, Homo sapiens
MSGACTSYVSAEQEVVRGFSCPRPGGEAAAVFCCGFRDHKYCCDDPHSFFPYEHSYMWWLRDGVSPCCPGWS

SEQ ID NO: 3603 - protein, 278 aa, Homo sapiens [sequence omitted]

SEQ ID NO: 3604 - protein, 54 aa, Homo sapiens
MDSMPEPASRCLLLLPLLLLLLLLLPAPELGPSQAGAEENDWVRLPSKCEGTCG

SEQ ID NO: 3605 - protein, 101 aa, Homo sapiens
MVCEKCEKKLGTVITPDTWKDGARNTTESGGRKLNENKALTSKKARFDPYGKNKFSTCRICKSSVHQPGSHYCQGCAYKKGICAMCGKKVLDTKNYKQTSV

SEQ ID NO: 3606 - protein, 205 aa, Homo sapiens
MPSKKKKYNARFPPARIKKIMQTDEEIGKVAAAVPVIISRALELFLESLLKKACQVTQSRNAKTMTTSHLKQCIELEQQFDFLKDLVASVPDMQGDGEDNHMDGDKGARRGRKPGSGGRKNGGMGTKSKDKKLSGTDSEQEDESEDTDTDGEEETSQPPPQASHPSAHFQSPPTPFLPFASTLPLPPAPPGPSAPDEEDEEDYDS

SEQ ID NO: 3607 - protein, 235 aa, Homo sapiens
MAAANPWDPASAPNGAGLVLGHFIASGMVNQEMLNMSKKTVSCFVNFTRLQQITNIQAEIYQKNLEIELLKLEKDTADVVHPFFLAQKCHTLQSMNNHLEAVLKEKRSLRQRLLKPMCQENLPIEAVYHRYMVHLLELAVTFIERLETHLETIRNIPHLAANLKKMNQALAKMDILVTETEELAENILKWRKQQNEVSSCIPKILAEESYLYKHDIIMPPLPFTSKVHVQTINAK

SEQ ID NO: 3608 - protein, 458 aa, Homo sapiens
MAAASGYTDLREKLKSMTSRDNYKAGSREAAAAAAAAVAAAAAAAAAAEPYPVSGAKRKYQEDSDPERSDYEEQQLQKEEEARKVKSGIRQMRLFSQDECAKIEARIDEVVSRAEKGLYNEHTVDRAPLRNKYFFGEGYTYGAQLQKRGPGQERLYPPGDVDEIPEWVHQLVIQKLVEHRVIPEGFVNSAVINDYQPGGCIVSHVDPIHIFERPIVSVSFFSDSALCFGCKFQFKPIRVSEPVLSLPVRRGSVTVLSGYAADEITHCIRPQDIKERRAVIILRKTRLDAPRLETKSLSSSVLPPSYASDRLSGNNRDPALKPKRSHRKADPDAAHRPRILEMDKEENRRSVLLPTHRRRGSFSSENYWRKSYESSEDCSEAAGSPGNSGSSLRSCPSFCFEGFVFVHWGVFVFCFLFFLILYIFPWFCCLLGLKNRIGQDLGSHILGIPPGWKGCWHQ

SEQ ID NO: 3609 - protein, 104 aa, Homo sapiens
MWGDLWLLPPASANPGTGTEAEFEKAAEEVRHLKTKPSDEEMLFIYGHYKQATVGDINTERPGMLDFTGKAKWDAWNELKGTSKEDAMKAYINKVEELKKKYGI

SEQ ID NO: 3610 - protein, 201 aa, Homo sapiens
MAGKSSLFKVILLGDGGVGKSSLMNRYVTNKFDTQLFHTIGVEFLNKDLEVDGHFVTMQIWDTAGQERFRSLRTPFYRGSDCCLLTFSVDDSQSFQNLSNWKKEFIYYADVKEPESFPFVILGNKIDISERQVSTEEAQAWCRDNGDYPYFETSAKDATNVAAAFEEAVRRVLATEDRSDHLIQTDTVNLHRKPKPSSSCC

SEQ ID NO: 3611 - protein, 585 aa, Homo sapiens
MAPSTPLLTVRGSEGLYMVNGPPHFTESTVFPRESGKNCKVCIFSKDGTLFAWGNGEKVNIISVTNKGLLHSFDLLKAVCLEFSPKNTVLATWQPYTTSKDGTAGIPNLQLYDVKTGTCLKSFIQKKMQNWCPSWSEDETLCARNVNNEVHFFENNNFNTIANKLHLQKINDFVLSPGPQPYKVAVYVPGSKGAPSFVRLYQYPNFAGPHAALANKSFFKADKVTMLWNKKATAVLVIASTDVDKTGASYYGEQTLHYIATNGESAVVQLPKNGPIYDVVWNSSSTEFCAVYGFMPAKATIFNLKCDPVFDFGTGPRNAAYYSPHGHILVLAGFGNLRGQMEVWDVKNYKLISKPVASDSTYFAWCPDGEHILTATCAPRLRVNNGYKIWHYTGSILHKYDVPSNAELWQVSWQPFLDGIFPAKTITYQAVPSEVPNEEPKVATAYRPPALRNKPITNSKLHEEEPPQNMKPQSGNDKPLSKTALKNQRKHEAKKAAKQEARSDKSPDLAPTPAPQSTPRNTVSQSISGDPEIDKKIKNLKKKLKAIEQLKEQAATGKQLEKNQLEKIQKETALLQELEDLELGI

SEQ ID NO: 3612 - protein, 263 aa, Homo sapiens
MGCIQSIGGKARVFREGITVIDVKASIDPVPTSIDESSSVVLRYRTPHFRASAQVVMPPIPKKETWVVGWIQACSHMEFYNQYGEQGMSSWELPDLQEGKIQAISDSDGVNYPWYGNTTETCTIVGPTKRDSKFIISMNDNFYPSVTWAVPVSESNVAKLTNIYRDQSFTTWLVATNTSTNDMIILQTLHWRMQLSIEVNPNRPLGQRARLREPIAQDQPKILSKNEPIPPSALVKPNANDAQVLMWRPKYGQPLVVIPPKHR

SEQ ID NO: 3613 - protein, 225 aa, Homo sapiens
MDIRPNHTIYINNMNDKIKKEELKRSLYALFSQFGHVVDIVALKTMKMRGQAFVIFKELGSSTNALRQLQGFPFYGKPMRIQYAKTDSDIISKMRGTFADKEKKKEKKKAKTVEQTATTTNKKPGQGTPNSANTQGNSTPNPQVPDYPPNYILFLNNLPEETNEMMLSMLFNQFPGFKEVRLVPGRHDIAFVEFENDGQAGAARDALQGFKITPSHAMKITYAKK

SEQ ID NO: 3614 - protein, 225 aa, Homo sapiens; identical to SEQ ID NO: 3613

SEQ ID NO: 3615 - protein, 772 aa, Homo sapiens
MAAESALQVVEKLQARLAANPDPKKLLKYLKKLSTLPITVDILAETGVGKTVNSLRKHEHVGSFARDLVAQWKKLVPVERNAEPDEQDFEKSNSRKRPRDALQKEEEMEGDYQETWKATGSRSYSPDHRQKKHRKLSELERPHKVSHGHERRDERKRCHRMSPTYSSDPESSDYGHVQSPPSCTSPHQMYVDHYRSLEEDQEPIVSHQKPGKGHSNAFQDRLGASQERHLGEPHGKGVVSQNKEHKSSHKDKRPVDAKSDEKASVVSREKSHKALSKEENRRPPSGDNAREKPPSSGVKKEKDREGSSLKKKCLPPSEAASDNHLKKPKHRDPEKAKLDKSKQGLDSFDTGKGAGDLLPKVKEKGSNNLKTPEGKVKTNLDRKSLGSLPKVEETDMEDEFEQPTMSFESYLSYDQPRKKKKKIVKTSATALGDKGLKKNDSKSTGKNLDSVQKLPKVNKTKSEKPAGADLAKLRKVPDVLPVLPDLPLPAIQANYRPLPSLELISSFQPKRKAFSSPQEEEEAGFTGRRMNSKMQVYSGSKCAYLPKMMTLHQQCIRVLKNNIDSIFEVGGVPYSVLEPVLERCTPDQLYRIEEYNHVLIEETDQLWKVHCHRDFKEERPEEYESWREMYLRLQDAREQRLRVLTKNIQFAHANKPKGRQAKMAFVNSVAKPPRDVRRRQEKFGTGGAAVPEKIKIKPAPYPMGSSHASASSISFNPSPEEPAYDGPSTSSAHLAPVVSSTVSYDPRKPTVKKIAPMMAKTIKAFKNRFSRR

SEQ ID NO: 3616 - protein, 222 aa, Homo sapiens
MSLKMDNRDVAGKANRWFGVAPPKSGKMNMNILHQEELIAQKKREIEAKMEQKAKQNQVASPQPPHPGEITNAHNSSCISNKFANDGSFLQQFLKLQKAQTSTDAPTSAPSAPPSTPTPSAGKRSLLISRRTGLGLASLPGPVKSYSHAKQLPVAHRPSVFQSPDEDEEEDYEQWLEIKVCLTKTVRPTPPSSWCFVPGLGTPDSLLHLTLFSPHPLCRCGP

SEQ ID NO: 3617 - protein, 645 aa, Homo sapiens
MSLKMDNRDVAGKANRWFGVAPPKSGKMNMNILHQEELIAQKKREIEAKMEQKAKQNQVASPQPPHPGEITNAHNSSCISNKFANDGSFLQQFLKLQKAQTSTDAPTSAPSAPPSTPTPSAGKRSLLISRRTGLGLASLPGPVKSYSHAKQLPVAHRPSVFQSPDEDEEEDYEQWLEIKVSPPEGAETRKVIEKLARFVAEGGPELEKVAMEDYKDNPAFAFLHDKNSREFLYYRKKVAEIRKEAQKSQAASQKVSPPEDEEVKNLAEKLARFIADGGPEVETIALQNNRENQAFSFLYEPNSQGYKYYRQKLEEFRKAKASSTGSFTAPDPGLKRKSPPEALSGSLPPATTCPASSTPAPTIIPAPAAPGKPASAATVKRKRKSRWGPEEDKVELPPAELVQRDVDASPSPLSVQDLKGLGYEKGKPVGLVGVTELSDAQKKQLKEQQEMQQMYDMIMQHKRAMQDMQLLWEKAVQQHQHGYDSDEEVDSELGTWEHQLRRMEMDKTREWAEQLTKMGRGKHFIGDFLPPDELEKFMETFKALKEGREPDYSEYKEFKLTVENIGYQMLMKMGWKEGEGLGSEGQGIKNPVNKGTTTVDGAGFGIDRPAELSKEDDEYEAFRKRMMLAYRFRPNPLNNPRRPYY

SEQ ID NO: 3618 - protein, 129 aa, Homo sapiens
MSLKMDNRDVAGKANRWFGVAPPKSGKMNMNILHQEELIAQKKREIEAKMEQKAKQNQVASPQPPHPGERPDQCAQRPSQHTHPQRWEEVPAHQQADRPGAGQPAGPCEELLPRQAAARGAPPECLPVP

SEQ ID NO: 3619 - protein, 471 aa, Homo sapiens
MKGNYESLISMDYAINQPDVLSQIQPEGEHNTEDQAGPEESEIPTDPSEEPGISTSDILSWIKQEEEPQVGAPPESKESDVYKSTYADEELVIKAEGLARSSLCPEVPVPFSSPPAAAKDAFSDVAFKSQQSTSMTPFGRPATDLPEASEGQVTFTQLGSYPLPPPVGEQVFSCHHCGKNLSQDMLLTHQCSHATEHPLPCAQCPKHFTPQADLSSTSQDHASETPPTCPHCARTFTHPSRLTYHLRVHNSTERPFPCPDCPKRFADQARLTSHRRAHASERPFRCAQCGRSFSLKISLLLHQRGHAQERPFSCPQCGIDFNGHSALIRHQMIHTGERPYPCTDCSKSFMRKEHLLNHRRLHTGERPFSCPHCGKSFIRKHHLMKHQRIHTGERPYPCSYCGRSFRYKQTLKDHLRSGHNGGCGGDSDPSGQPPNPPGPLITGLETSGLGVNTEGLETNQWYGEGSGGGVL

SEQ ID NO: 3620 - protein, 642 aa, Homo sapiens
MAEAAPAPTSEWDSECLTSLQPLPLPTPPAANEAHLQTAAISLWTVVAAVQAIERKVEIHSRRLLHLEGRTGTAEKKLASCEKTVTELGNQLEGKWAVLGTLLQEYGLLQRRLENLENLLRNRNFWILRLPPGIKGDIPKVPVAFDDVSIYFSTPEWEKLEEWQKELYKNIMKGNYESLISMDYAINQPDVLSQIQPEGEHNTEDQAGPEESEIPTDPSEEPGISTSDILSWIKQEEEPQVGAPPESKESDVYKSTYADEELVIKAEGLARSSLCPEVPVPFSSPPAAAKDAFSDVAFKSQQSTSMTPFGRPATDLPEASEGQVTFTQLGSYPLPPPVGEQVFSCHHCGKNLSQDMLLTHQCSHATEHPLPCAQCPKHFTPQADLSSTSQDHASETPPTCPHCARTFTHPSRLTYHLRVHNSTERPFPCPDCPKRFADQARLTSHRRAHASERPFRCAQCGRSFSLKISLLLHQRGHAQERPFSCPQCGIDFNGHSALIRHQMIHTGERPYPCTDCSKSFMRKEHLLNHRRLHTGERPFSCPHCGKSFIRKHHLMKHQRIHTGERPYPCSYCGRSFRYKQTLKDHLRSGHNGGCGGDSDPSGQPPNPPGPLITGLETSGLGVNTEGLETNQWYGEGSGGGVL

SEQ ID NO: 3621 - protein, 335 aa, Homo sapiens
MEDSGKTFSSEEEEANYWKDLAMTYKQRAENTQEELREFQEGSREYEAELETQLQQIETRNRDLLSENNRLRMELETIKEKFEVQHSEGYRQISALEDDLAQTKAIKDQLQKYIRELEQANDDLERAKRATIMSLEDFEQRLNQAIERNAFLESELDEKENLLESVQRLKDEARDLRQELAVQQKQEKPRTPMPSSVEAERTDTAVQATGSVPSTPIAHRGPSSSLNTPGSFRRGLDDSTGGTPLTPAARISALNIVGDLLRKVGALESKLASCRNLVYDQSPNRTGGPASGRSSKNRDGGERRPSSTSVPLGDKGLDTSCRWLSKSTTRSSSSC

SEQ ID NO: 3622 - protein, 524 aa, Homo sapiens
MLTCNKAGSRMVVDAANSNGPFQPVVLLHIRDVPPADQEKLFIQKLRQCCVLFDFVSDPLSDLKWKEVKRAALSEMVEYITHNRNVITEPIYPEVVHMFAVNMFRTLPPSSNPTGAEFDPEEDEPTLEAAWPHLQLVYEFFLRFLESPDFQPNIAKKYIDQKFVLQLLELFDSEDPRERDFLKTTLHRIYGKFLGLRAYIRKQINNIFYRFIYETEHHNGIAELLEILGSIINGFALPLKEEHKIFLLKVLLPLHKVKSLSVYHPQLAYCVVQFLEKDSTLTEPVVMALLKYWPKTHSPKEVMFLNELEEILDVIEPSEFVKIMEPLFRQLAKCVSSPHFQVAERALYYWNNEYIMSLISDNAAKILPIMFPSLYRNSKTHWNKTIHGLIYNALKLFMEMNQKLFDDCTQQFKAEKLKEKLKMKEREEAWVKIENLAKANPQYTVYSQASTMSIPVAMETDGPLFEDVQMLRKTVKDEAHQAQKDPKKDRPLARRKSELPQDPHTKKALEAHCRADELASQDGR

SEQ ID NO: 3623 - protein, 485 aa, Homo sapiens
MLTCNKAGSRMVVDAANSNGPFQPVVLLHIRDVPPADQEKLFIQKLRQCCVLFDFVSDPLSDLKWKEVKRAALSEMVEYITHNRNVITEPIYPEVVHMFAVNMFRTLPPSSNPTGAEFDPEEDEPTLEAAWPHLQLVYEFFLRFLESPDFQPNIAKKYIDQKFVLQLLELFDSEDPRERDFLKTTLHRIYGKFLGLRAYIRKQINNIFYRFIYETEHHNGIAELLEILGSIINGFALPLKEEHKIFLLKVLLPLHKVKSLSVYHPQLAYCVVQFLEKDSTLTEPVVMALLKYWPKTHSPKEVMFLNELEEILDVIEPSEFVKIMEPLFRQLAKCVSSPHFQVAERALYYWNNEYIMSLISDNAAKILPIMFPSLYRNSKTHWNKTIHGLIYNALKLFMEMNQKLFDDCTQQFKAEKLKEKLKMKEREEAWVKIENLAKANPQAQKDPKKDRPLARRKSELPQDPHTKKALEAHCRADELASQDGR

SEQ ID NO: 3624 - protein, 449 aa, Homo sapiens
MLTCNKAGSRMVVDAANSNGPFQPVVLLHIRDVPPADQEKLFIQKLRQCCVLFDFVSDPLSDLKWKEVKRAALSEMVEYITHNRNVITEPIYPEVVHMFAVNMFRTLPPSSNPTGAEFDPEEDEPTLEAAWPHLQLVYEFFLRFLESPDFQPNIAKKYIDQKFVLQLLELFDSEDPRERDFLKTTLHRIYGKFLGLRAYIRKQINNIFYRFIYETEHHNGIAELLEILGSIINGFALPLKEEHKIFLLKVLLPLHKVKSLSVYHPQLAYCVVQFLEKDSTLTEPVVMALLKYWPKTHSPKEVMFLNELEEILDVIEPSEFVKIMEPLFRQLAKCVSSPHFQVAERALYYWNNEYIMSLISDNAAKILPIMFPSLYRNSKTHWNKTIHGLIYNALKLFMEMNQKLFDDCTQQFKAEKLKEKLKMKEREEAWVKIENLAKANPQVLKKRIT

SEQ ID NO: 3625 - protein, 384 aa, Homo sapiens
MLTCNKAGSRMVVDAANSNGPFQPVVLLHIRDVPPADQEKLFIQKLRQCCVLFDFVSDPLSDLKWKEVKRAALSEMVEYITHNRNVITEPIYPEVVHMFAVNMFRTLPPSSNPTGAEFDPEEDEPTLEAAWPHLQLVYEFFLRFLESPDFQPNIAKKYIDQKFVLQLLELFDSEDPRERDFLKTTLHRIYGKFLGLRAYIRKQINNIFYRFIYETEHHNGIAELLEILGSIINGFALPLKEEHKIFLLKVLLPLHKVKSLSVYHPQLAYCVVQFLEKDSTLTEPVVMALLKYWPKTHSPKEVMFLNELEEILDVIEPSEFVKIMEPLFRQLAKCVSSPHFQVAERALYYWNNEYIMSLISDNAAKILPIMFPSLYRNSKTHWNK

SEQ ID NO: 3626 - protein, 999 aa, Homo sapiens
MEAAHLLPAADVLRHFSVTAEGGLSPAQVTGARERYGPNELPSEEGKSLWELVLEQFEDLLVRILLLAALVSFVLAWFEEGEETTTAFVEPLVIMLILVANAIVGVWQERNAESAIEALKEYEPEMGKVIRSDRKGVQRIRARDIVPGDIVEVAVGDKVPADLRLIEIKSTTLRVDQSILTGESVSVTKHTEAIPDPRAVNQDKKNMLFSGTNITSGKAVGVAVATGLHTELGKIRSQMAAVEPERTPLQRKLDEFGRQLSHAISVICVAVWVINIGHFADPAHGGSWLRGAVYYFKIAVALAVAAIPEGLPAVITTCLALGTRRMARKNAIVRSLPSVETLGCTSVICSDKTGTLTTNQMSVCRMFVVAEADAGSCLLHEFTISGTTYTPEGEVRQGDQPVRCGQFDGLVELATICALCNDSALDYNEAKGVYEKVGEATETALTCLVEKMNVFDTDLQALSRVERAGACNTVIKQLMRKEFTLEFSRDRKSMSVYCTPTRPHPTGQGSKMFVKGAPESVIERCSSVRVGSRTAPLTPTSREQILAKIRDWGSGSDTLRCLALATRDAPPRKEDMELDDCSKFVQYETDLTFVGCVGMLDPPRPEVAACITRCYQAGIRVVMITGDNKGTAVAICRRLGIFGDTEDVAGKAYTGREFDDLSPEQQRQACRTARCFARVEPAHKSRIVENLQSFNEITAMTGDGVNDAPALKKAEIGIAMGSGTAVAKSAAEMVLSDDNFASIVAAVEEGRAIYSNMKQFIRYLISSNVGEVVCIFLTAILGLPEALIPVQLLWVNLVTDGLPATALGFNPPDLDIMEKLPRSPREALISGWLFFRYLAIGVYVGLATVAAATWWFVYDAEGPHINFYQLRNFLKCSEDNPLFAGIDCEVFESRFPTTMALSVLVTIEMCNALNSVSENQSLLRMPPWMNPWLLVAVAMSMALHFLILLVPPLPLIFQVTPLSGRQWVVVLQISLPVILLDEALKYLSRNHMHEEMSQK

SEQ ID NO: 3627 - protein, 1052 aa, Homo sapiens
MEAAHLLPAADVLRHFSVTAEGGLSPAQVTGARERYGPNELPSEEGKSLWELVLEQFEDLLVRILLLAALVSFVLAWFEEGEETTTAFVEPLVIMLILVANAIVGVWQERNAESAIEALKEYEPEMGKVIRSDRKGVQRIRARDIVPGDIVEVAVGDKVPADLRLIEIKSTTLRVDQSILTGESVSVTKHTEAIPDPRAVNQDKKNMLFSGTNITSGKAVGVAVATGLHTELGKIRSQMAAVEPERTPLQRKLDEFGRQLSHAISVICVAVWVINIGHFADPAHGGSWLRGAVYYFKIAVALAVAAIPEGLPAVITTCLALGTRRMARKNAIVRSLPSVETLGCTSVICSDKTGTLTTNQMSVCRMFVVAEADAGSCLLHEFTISGTTYTPEGEVRQGDQPVRCGQFDGLVELATICALCNDSALDYNEAKGVYEKVGEATETALTCLVEKMNVFDTDLQALSRVERAGACNTVIKQLMRKEFTLEFSRDRKSMSVYCTPTRPHPTGQGSKMFVKGAPESVIERCSSVRVGSRTAPLTPTSREQILAKIRDWGSGSDTLRCLALATRDAPPRKEDMELDDCSKFVQYETDLTFVGCVGMLDPPRPEVAACITRCYQAGIRVVMITGDNKGTAVAICRRLGIFGDTEDVAGKAYTGREFDDLSPEQQRQACRTARCFARVEPAHKSRIVENLQSFNEITAMTGDGVNDAPALKKAEIGIAMGSGTAVAKSAAEMVLSDDNFASIVAAVEEGRAIYSNMKQFIRYLISSNVGEVVCIFLTAILGLPEALIPVQLLWVNLVTDGLPATALGFNPPDLDIMEKLPRSPREALISGWLFFRYLAIGVYVGLATVAAATWWFVYDAEGPHINFYQLRNFLKCSEDNPLFAGIDCEVFESRFPTTMALSVLVTIEMCNALNSVSENQSLLRMPPWMNPWLLVAVAMSMALHFLILLVPPLPLIFQVTPLSGRQWVVVLQISLPVILLDEALKYLSRNHMHACLYPGLLRTVSQAWSRQPLTTSWTPDHTGLASLGQGHSIVSLSELLREGGSREEMSQK

SEQ ID NO: 3628 - protein, 1044 aa, Homo sapiens
MEAAHLLPAADVLRHFSVTAEGGLSPAQVTGARERYGPNELPSEEGKSLWELVLEQFEDLLVRILLLAALVSFVLAWFEEGEETTTAFVEPLVIMLILVANAIVGVWQERNAESAIEALKEYEPEMGKVIRSDRKGVQRIRARDIVPGDIVEVAVGDKVPADLRLIEIKSTTLRVDQSILTGESVSVTKHTEAIPDPRAVNQDKKNMLFSGTNITSGKAVGVAVATGLHTELGKIRSQMAAVEPERTPLQRKLDEFGRQLSHAISVICVAVWVINIGHFADPAHGGSWLRGAVYYFKIAVALAVAAIPEGLPAVITTCLALGTRRMARKNAIVRSLPSVETLGCTSVICSDKTGTLTTNQMSVCRMFVVAEADAGSCLLHEFTISGTTYTPEGEVRQGDQPVRCGQFDGLVELATICALCNDSALDYNEAKGVYEKVGEATETALTCLVEKMNVFDTDLQALSRVERAGACNTVIKQLMRKEFTLEFSRDRKSMSVYCTPTRPHPTGQGSKMFVKGAPESVIERCSSVRVGSRTAPLTPTSREQILAKIRDWGSGSDTLRCLALATRDAPPRKEDMELDDCSKFVQYETDLTFVGCVGMLDPPRPEVAACITRCYQAGIRVVMITGDNKGTAVAICRRLGIFGDTEDVAGKAYTGREFDDLSPEQQRQACRTARCFARVEPAHKSRIVENLQSFNEITAMTGDGVNDAPALKKAEIGIAMGSGTAVAKSAAEMVLSDDNFASIVAAVEEGRAIYSNMKQFIRYLISSNVGEVVCIFLTAILGLPEALIPVQLLWVNLVTDGLPATALGFNPPDLDIMEKLPRSPREALISGWLFFRYLAIGVYVGLATVAAATWWFVYDAEGPHINFYQLRNFLKCSEDNPLFAGIDCEVFESRFPTTMALSVLVTIEMCNALNSVSENQSLLRMPPWMNPWLLVAVAMSMALHFLILLVPPLPLIFQVTPLSGRQWVVVLQISLPVILLDEALKYLSRNHMHACLYPGLLRTVSQAWSRQPLTTSWTPDHTGARDTASSRCQSCSEREEAGKK

SEQ ID NO: 3629 - protein, 1043 aa, Homo sapiens
MEAAHLLPAADVLRHFSVTAEGGLSPAQVTGARERYGPNELPSEEGKSLWELVLEQFEDLLVRILLLAALVSFVLAWFEEGEETTTAFVEPLVIMLILVANAIVGVWQERNAESAIEALKEYEPEMGKVIRSDRKGVQRIRARDIVPGDIVEVAVGDKVPADLRLIEIKSTTLRVDQSILTGESVSVTKHTEAIPDPRAVNQDKKNMLFSGTNITSGKAVGVAVATGLHTELGKIRSQMAAVEPERTPLQRKLDEFGRQLSHAISVICVAVWVINIGHFADPAHGGSWLRGAVYYFKIAVALAVAAIPEGLPAVITTCLALGTRRMARKNAIVRSLPSVETLGCTSVICSDKTGTLTTNQMSVCRMFVVAEADAGSCLLHEFTISGTTYTPEGEVRQGDQPVRCGQFDGLVELATICALCNDSALDYNEAKGVYEKVGEATETALTCLVEKMNVFDTDLQALSRVERAGACNTVIKQLMRKEFTLEFSRDRKSMSVYCTPTRPHPTGQGSKMFVKGAPESVIERCSSVRVGSRTAPLTPTSREQILAKIRDWGSGSDTLRCLALATRDAPPRKEDMELDDCSKFVQYETDLTFVGCVGMLDPPRPEVAACITRCYQAGIRVVMITGDNKGTAVAICRRLGIFGDTEDVAGKAYTGREFDDLSPEQQRQACRTARCFARVEPAHKSRIVENLQSFNEITAMTGDGVNDAPALKKAEIGIAMGSGTAVAKSAAEMVLSDDNFASIVAAVEEGRAIYSNMKQFIRYLISSNVGEVVCIFLTAILGLPEALIPVQLLWVNLVTDGLPATALGFNPPDLDIMEKLPRSPREALISGWLFFRYLAIGVYVGLATVAAATWWFVYDAEGPHINFYQLRNFLKCSEDNPLFAGIDCEVFESRFPTTMALSVLVTIEMCNALNSVSENQSLLRMPPWMNPWLLVAVAMSMALHFLILLVPPLPLIFQVTPLSGRQWVVVLQISLPVILLDEALKYLSRNHMHACLYPGLLRTVSQAWSRQPLTTSWTPDHTGRNEPEVSAGNRVESPVCTSD

SEQ ID NO: 3630 - protein, 1029 aa, Homo sapiens
MEAAHLLPAADVLRHFSVTAEGGLSPAQVTGARERYGPNELPSEEGKSLWELVLEQFEDLLVRILLLAALVSFVLAWFEEGEETTTAFVEPLVIMLILVANAIVGVWQERNAESAIEALKEYEPEMGKVIRSDRKGVQRIRARDIVPGDIVEVAVGDKVPADLRLIEIKSTTLRVDQSILTGESVSVTKHTEAIPDPRAVNQDKKNMLFSGTNITSGKAVGVAVATGLHTELGKIRSQMAAVEPERTPLQRKLDEFGRQLSHAISVICVAVWVINIGHFADPAHGGSWLRGAVYYFKIAVALAVAAIPEGLPAVITTCLALGTRRMARKNAIVRSLPSVETLGCTSVICSDKTGTLTTNQMSVCRMFVVAEADAGSCLLHEFTISGTTYTPEGEVRQGDQPVRCGQFDGLVELATICALCNDSALDYNEAKGVYEKVGEATETALTCLVEKMNVFDTDLQALSRVERAGACNTVIKQLMRKEFTLEFSRDRKSMSVYCTPTRPHPTGQGSKMFVKGAPESVIERCSSVRVGSRTAPLTPTSREQILAKIRDWGSGSDTLRCLALATRDAPPRKEDMELDDCSKFVQYETDLTFVGCVGMLDPPRPEVAACITRCYQAGIRVVMITGDNKGTAVAICRRLGIFGDTEDVAGKAYTGREFDDLSPEQQRQACRTARCFARVEPAHKSRIVENLQSFNEITAMTGDGVNDAPALKKAEIGIAMGSGTAVAKSAAEMVLSDDNFASIVAAVEEGRAIYSNMKQFIRYLISSNVGEVVCIFLTAILGLPEALIPVQLLWVNLVTDGLPATALGFNPPDLDIMEKLPRSPREALISGWLFFRYLAIGVYVGLATVAAATWWFVYDAEGPHINFYQLRNFLKCSEDNPLFAGIDCEVFESRFPTTMALSVLVTIEMCNALNSVSENQSLLRMPPWMNPWLLVAVAMSMALHFLILLVPPLPLIFQVTPLSGRQWVVVLQISLPVILLDEALKYLSRNHMHACLYPGLLRTVSQAWSRQPLTTSWTPDHTGLASLKK

SEQ ID NO: 3631 - protein, 998 aa, Homo sapiens
MEAAHLLPAADVLRHFSVTAEGGLSPAQVTGARERYGPNELPSEEGKSLWELVLEQFEDLLVRILLLAALVSFVLAWFEEGEETTTAFVEPLVIMLILVANAIVGVWQERNAESAIEALKEYEPEMGKVIRSDRKGVQRIRARDIVPGDIVEVAVGDKVPADLRLIEIKSTTLRVDQSILTGESVSVTKHTEAIPDPRAVNQDKKNMLFSGTNITSGKAVGVAVATGLHTELGKIRSQMAAVEPERTPLQRKLDEFGRQLSHAISVICVAVWVINIGHFADPAHGGSWLRGAVYYFKIAVALAVAAIPEGLPAVITTCLALGTRRMARKNAIVRSLPSVETLGCTSVICSDKTGTLTTNQMSVCRMFVVAEADAGSCLLHEFTISGTTYTPEGEVRQGDQPVRCGQFDGLVELATICALCNDSALDYNEAKGVYEKVGEATETALTCLVEKMNVFDTDLQALSRVERAGACNTVIKQLMRKEFTLEFSRDRKSMSVYCTPTRPHPTGQGSKMFVKGAPESVIERCSSVRVGSRTAPLTPTSREQILAKIRDWGSGSDTLRCLALATRDAPPRKEDMELDDCSKFVQYETDLTFVGCVGMLDPPRPEVAACITRCYQAGIRVVMITGDNKGTAVAICRRLGIFGDTEDVAGKAYTGREFDDLSPEQQRQACRTARCFARVEPAHKSRIVENLQSFNEITAMTGDGVNDAPALKKAEIGIAMGSGTAVAKSAAEMVLSDDNFASIVAAVEEGRAIYSNMKQFIRYLISSNVGEVVCIFLTAILGLPEALIPVQLLWVNLVTDGLPATALGFNPPDLDIMEKLPRSPREALISGWLFFRYLAIGVYVGLATVAAATWWFVYDAEGPHINFYQLRNFLKCSEDNPLFAGIDCEVFESRFPTTMALSVLVTIEMCNALNSVSENQSLLRMPPWMNPWLLVAVAMSMALHFLILLVPPLPLIFQVTPLSGRQWVVVLQISLPVILLDEALKYLSRNHMHEMSQK

SEQ ID NO: 3632 - protein, 1029 aa, Homo sapiens; identical to SEQ ID NO: 3630

SEQ ID NO: 3633 - protein, 342 aa, Homo sapiens
MDILKSEILRKRQLVEDRNLLVENKKYFKRSELAKKEEEAYFERCGYKIQPKEEDQKPLTSSNPVLELELAEEKLPMTLSRQEVIRRLRERGEPIRLFGETDYDAFQRLRKIEILTPEVNKGLRNDLKAALDKIDQQYLNEIVGGQEPGEEDTQNDLKVHEENTTIEELEALGESLGKGDDHKDMDIITKFLKFLLGVWAKELNAREDYVKRSVQGKLNSATQKQTESYLRPLFRKLRKRNLPADIKESITDIIKFMLQREYVKANDAYLQMAIGNAPWPIGVTMVGIHARTGREKIFSKHVAHVLNDETQRKYIQGLKRLMTICQKHFPTDPSKCVEYNAL

SEQ ID NO: 3634 - protein, 286 aa, Homo sapiens
MNPASDGGTSESIFDLDYASWGIRSTLMVAGFVFYLGVFVVCHQLSSSLNATYRSLVAREKVFWDLAATRAVFGVQSTAAGLWALLGDPVLHADKARGQQNWCWFHITTATGFFCFENVAVHLSNLIFRTFDLFLVIHHLFAFLGFLGCLVNLQAGHYLAMTTLLLEMSTPFTCVSWMLLKAGWSESLFWKLNQWLMIHMFHCRMVLTYHMWWVCFWHWDGLVSSLYLPHLTLFLVGLALLTLIINPYWTHKKTQQLLNPVDWNFAQPEAKSRPEGNGQLLRKKRP

SEQ ID NO: 3635 - protein, 484 aa, Homo sapiens
MKKGIRYETSRKTSYIFQQPQHGPWQTRMRKISNHGSLRVAKVAYPLGLCVGVFIYVAYIKWHRATATQAFFSITRAAPGARWGQQAHSPLGTAADGHEVFYGIMFDAGSTGTRVHVFQFTRPPRETPTLTHETFKAVKPGLSAYADDVEKSAQGIRELLDVAKQDIPFDFWKATPLVLKATAGLRLLPGEKAQKLLQKVKEVFKASPFLVGDDCVSIMNGTDEGVSAWITINFLTGSLKTPGGSSVGMLDLGGGSTQIAFLPRVEGTLQASPPGYLTALRMFNRTYKLYSYSYLGLGLMSARLAILGGVEGQPAKDGKELVSPCLSPSFKGEWEHAEVTYRVSGQKAAASLHELCAARVSEVLQNRVHRTEEVKHVDFYAFSYYYDLAAGVGLIDAEKGGSLVVGDFEIAAKYVCRTLETQPQSSPFSCMDLTYVSLLLQEFGFPRSKVLKLTRKIDNVETSWALGAIFHYIDSLNRQKSPAS

SEQ ID NO: 3636 - protein, 822 aa, Homo sapiens
MAAAVVVAEGDSDSRPGQELLVAWNTVSTGLVPPAALGLVSSRTSGAVPPKEEELRAAVEVLRGHGLHSVLEEWFVEVLQNDLQANISPEFWNAISQCENSADEPQCLLLLLDAFGLLESRLDPYLRSLELLEKWTRLGLLMGTGAQGLREEVHTMLRGVLFFSTPRTFQEMIQRLYGCFLRVYMQSKRKGEGGTDPELEGELDSRYARRRYYRLLQSPLCAGCSSDKQQCWCRQALEQFHQLSQVLHRLSLLERVSAEAVTTTLHQVTRERMEDRCRGEYERSFLREFHKWIERVVGWLGKVFLQDGPARPASPEAGNTLRRWRCHVQRFFYRIYASLRIEELFSIVRDFPDSRPAIEDLKYCLERTDQRQQLLVSLKAALETRLLHPGVNTCDIITLYISAIKALRVLDPSMVILEVACEPIRRYLRTREDTVRQIVAGLTGDSDGTGDLAVELSKTDPASLETGQDSEDDSGEPEDWVPDPVDADPGKSSSKRRSSDIISLLVSIYGSKDLFINEYRSLLADRLLHQFSFSPEREIRNVELLKLRFGEAPMHFCEVMLKDMADSRRINANIREEDEKRPAEEQPPFGVYAVILSSEFWPPFKDEKLEVPEDIRAALEAYCKKYEQLKAMRTLSWKHTLGLVTMDVELADRTLSVAVTPVQAVILLYFQDQASWTLEELSKAVKMPVALLRRRMSVWLQQGVLREEPPGTFSVIEEERPQDRDNMVLIDSDDESDSGMASQADQKEEELLLFWTYIQAMLTNLESLSLDRIYNMLRMFVVTGPALAEIDLQELQGYLQKKVRDQQLVYSAGVYRLPKNCS

SEQ ID NO: 3637 - protein, 795 aa, Homo sapiens
MTSGATRYRLSCSLRGHELDVRGLVCCAYPPGAFVSVSRDRTTRLWAPDSPNRSFTEMHCMSGHSNFVSCVCIIPSSDIYPHGLIATGGNDHNICIFSLDSPMPLYILKGHKNTVCSLSSGKFGTLLSGSWDTTAKVWLNDKCMMTLQGHTAAVWAVKILPEQGLMLTGSADKTVKLWKAGRCERTFSGHEDCVRGLAILSETEFLSCANDASIRRWQITGECLEVYYGHTNYIYSISVFPNCRDFVTTAEDRSLRIWKHGECAQTIRLPAQSIWCCCVLDNGDIVVGASDGIIRVFTESEDRTASAEEIKAFEKELSHATIDSKTGDLGDINAEQLPGREHLNEPGTREGQTRLIRDGEKVEAYQWSVSEGRWIKIGDVVGSSGANQQTSGKVLYEGKEFDYVFSIDVNEGGPSYKLPYNTSDDPWLTAYNFLQKNDLNPMFLDQVAKFIIDNTKGQMLGLGNPSFSDPFTGGGRYVPGSSGSSNTLPTADPFTGAGRYVPGSASMGTTMAGVDPFTGNSAYRSAASKTMNIYFPKKEAVTFDQANPTQILGKLKELNGTAPEEKKLTEDDLILLEKILSLICNSSSEKPTVQQLQILWKAINCPEDIVFPALDILRLSIKHPSVNENFCNEKEGAQFSSHLINLLNPKGKPANQLLALRTFCNCFVGQAGQKLMMSQRESLMSHAIELKSGSNKNIHIALATLALNYSVCFHKDHNIEGKAQCLSLISTILEVVQDLEATFRLLVALGTLISDDSNAVQLAKSLGVDSQIKKYSSVSEPAKVSECCRFILNLL

SEQ ID NO: 3638 - protein, 738 aa, Homo sapiens
MHCMSGHSNFVSCVCIIPSSDIYPHGLIATGGNDHNICIFSLDSPMPLYILKGHKNTVCSLSSGKFGTLLSGSWDTTAKVWLNDKCMMTLQGHTAAVWAVKILPEQGLMLTGSADKTVKLWKAGRCERTFSGHEDCVRGLAILSETEFLSCANDASIRRWQITGECLEVYYGHTNYIYSISVFPNCRDFVTTAEDRSLRIWKHGECAQTIRLPAQSIWCCCVLDNGDIVVGASDGIIRVFTESEDRTASAEEIKAFEKELSHATIDSKTGDLGDINAEQLPGREHLNEPGTREGQTRLIRDGEKVEAYQWSVSEGRWIKIGDVVGSSGANQQTSGKVLYEGKEFDYVFSIDVNEGGPSYKLPYNTSDDPWLTAYNFLQKNDLNPMFLDQVAKFIIDNTKGQMLGLGNPSFSDPFTGGGRYVPGSSGSSNTLPTADPFTGAGRYVPGSASMGTTMAGVDPFTGNSAYRSAASKTMNIYFPKKEAVTFDQANPTQILGKLKELNGTAPEEKKLTEDDLILLEKILSLICNSSSEKPTVQQLQILWKAINCPEDIVFPALDILRLSIKHPSVNENFCNEKEGAQFSSHLINLLNPKGKPANQLLALRTFCNCFVGQAGQKLMMSQRESLMSHAIELKSGSNKNIHIALATLALNYSVCFHKDHNIEGKAQCLSLISTILEVVQDLEATFRLLVALGTLISDDSNAVQLAKSLGVDSQIKKYSSVSEPAKVSECCRFILNLL

SEQ ID NO: 3639 - protein, 351 aa, Homo sapiens
MVIMGQCYYNETIGFFYNNSGKELSSHWRPKDVVVVALGLTVSVLVLLTNLLVIAAIASNRRFHQPIYYLLGNLAAADLFAGVAYLFLMFHTGPRTARLSLEGWFLRQGLLDTSLTASVATLLAIAVERHRSVMAVQLHSRLPRGRVVMLIVGVWVAALGLGLLPAHSWHCLCALDRCSRMAPLLSRSYLAVWALSSLLVFLLMVAVYTRIFFYVRRRVQRMAEHVSCHPRYRETTLSLVKTVVIILGAFVVCWTPGQVVLLLDGLGCESCNVLAVEKYFLLLAEANSLVNAAVYSCRDAEMRRTFRRLLCCACLRQSTRESVHYTSSAQGGASTRIMLPENGHPLMDSTL

SEQ ID NO: 3640 - protein, 397 aa, Homo sapiens
MVKETTYYDVLGVKPNATQEELKKAYRKLALKYHPDKNPNEGEKFKQISQAYEVLSDAKKRELYDKGGEQAIKEGGAGGGFGSPMDIFDMFFGGGGRMQRERRGKNVVHQLSVTLEDLYNGATRKLALQKNVICDKCEGRGGKKGAVECCPNCRGTGMQIRIHQIGPGMVQQIQSVCMECQGHGERISPKDRCKSCNGRKIVREKKILEVHIDKGMKDGQKITFHGEGDQEPGLEPGDIIIVLDQKDHAVFTRRGEDLFMCMDIQLVEALCGFQKPISTLDNRTIVITSHPGQIVKHGDIKCVLNEGMPIYRRPYEKGRLIIEFKVNFPENGFLSPDKLSLLEKLLPERKEVEETDEMDQVELVDFDPNQERRRHYNGEAYEDDEHHPRGGVQCQTS

SEQ ID NO: 3641 - protein, 2671 aa, Homo sapiens
MSEMSSFLHIGDIVSLYAEGSVNGFISTLGLVDDRCVVEPAAGDLDNPPKKFRDCLFKVCPMNRYSAQKQYWKAKQTKQDKEKIADVVLLQKLQHAAQMEQKQNDTENKKVHGDVVKYGSVIQLLHMKSNKYLTVNKRLPALLEKNAMRVTLDATGNEGSWLFIQPFWKLRSNGDNVVVGDKVILNPVNAGQPLHASNYELSDNAGCKEVNSVNCNTSWKINLFMQFRDHLEEVLKGGDVVRLFHAEQEKFLTCDEYKGKLQVFLRTTLRQSATSATSSNALWEVEVVHHDPCRGGAGHWNGLYRFKHLATGNYLAAEENPSYKGDASDPKAAGMGAQGRTGRRNAGEKIKYCLVAVPHGNDIASLFELDPTTLQKTDSFVPRNSYVRLRHLCTNTWIQSTNVPIDIEEERPIRLMLGTCPTKEDKEAFAIVSVPVSEIRDLDFANDASSMLASAVEKLNEGFISQNDRRFVIQLLEDLVFFVSDVPNNGQNVLDIMVTKPNRERQKLMREQNILKQVFGILKVPFREKGGEGPLVRLEELSDQKNAPYQHMFRLCYRVLRYSQEDYRKNQEHIAKQFGMMQSQIGYDILAEDTITALLHNNRKLLEKHITKTEVETFVSLVRKNREPRFLDYLSDLCVSNHIAIPVTQELICKCVLDPKNSDILIRTELRPVKEMAQSHEYLSIEYSEEEVWLTWTDKNNEHHEKSVRQLAQEARAGNAHDENVLSYYRYQLKLFARMCLDRQYLAIDEISQQLGVDLIFLCMADEMLPFDLRASFCHLMLHVHVDRDPQELVTPVKFARLWTEIPTAITIKDYDSNLNASRDDKKNKFANTMEFVEDYLNNVVSEAVPFANEEKNKLTFEVVSLAHNLIYFGFYSFSELLRLTRTLLGIIDCVQGPPAMLQAYEDPGGKNVRRSIQGVGHMMSTMVLSRKQSVFSAPSLSAGASAAEPLDRSKFEENEDIVVMETKLKILEILQFILNVRLDYRISYLLSVFKKEFVEVFPMQDSGADGTAPAFDSTTANMNLDRIGEQAEAMFGVGKTSSMLEVDDEGGRMFLRVLIHLTMHDYAPLVSGALQLLFKHFSQRQEAMHTFKQVQLLISAQDVENYKVIKSELDRLRTMVEKSELWVDKKGSGKGEEVEAGTAKDKKERPTDEEGFLHPPGEKSSENYQIVKGILERLNKMCGVGEQMRKKQQRLLKNMDAHKVMLDLLQIPYDKGDAKMMEILRYTHQFLQKFCAGNPGNQALLHKHLHLFLTPGLLEAETMQHIFLNNYQLCSEISEPVLQHFVHLLATHGRHVQYLDFLHTVIKAEGKYVKKCQDMIMTELTNAGDDVVVFYNDKASLAHLLDMMKAARDGVEDHSPLMYHISLVDLLAACAEGKNVYTEIKCTSLVPLEDVVSVVTHEDCITEVKMAYVNFVNHCYVDTEVEMKEIYTSNHIWTLFENFTLDMARVCSKREKRVADPTLEKYVLSVVLDTINAFFSSPFSENSTSLQTHQPVVVQLLQSTTRLLECPWLQQQHKGSVEACIRTLAMVAKGRAILLPMDLDAHISSMLSSGASCAAAAQRNASSYKATTRAFPRVTPTANQWDYKNIIEKLQDIITALEERLKPLVQAELSVLVDVLHWPELLFLEGSEAYQRCESGGFLSKLIQHTKDLMESEEKLCIKVLRTLQQMLVKKTKYGDRGNQLRKMLLQNYLQNRKSTSRGDLPDPIGTGLDPDWSAIAATQCRLDKEGATKLVCDLITSTKNEKIFQESIGLAIHLLDGGNTEIQKSFHNLMMSDKKSERFFKVLHDRMKRAQQETKSTVAVNMNDLGSQPHEDREPVDPTTKGRVASFSIPGSSSRYSLGPSLRRGHEVSERVQSSEMGTSVLIMQPILRFLQLLCENHNRDLQNFLRCQNNKTNYNLVCETLQFLDIMCGSTTGGLGLLGLYINEDNVGLVIQTLETLTEYCQGPCHENQTCIVTHESNGIDIITALILNDISPLCKYRMDLVLQLKDNASKLLLALMESRHDSENAERILISLRPQELVDVIKKAYLQEEERENSEVSPREVGHNIYILALQLSRHNKQLQHLLKPVKRIQEEEAEGISSMLSLNNKQLSQMLKSSAPAQEEEEDPLAYYENHTSQIEIVRQDRSMEQIVFPVPGICQFLTEETKHRLFTTTEQDEQGSKVSDFFDQSSFLHNEMEWQRNVRSMPLIYWFSRRMTLWGSISFNLAVFINIIIAFFYPYMEGASTGVLDSPLISLLFWILICFSIAALFTKRYSIRPLIVALILRSIYYLGIGPTLNILGALNLTNKIVFVVSFVGNRGTFIRGYKAMVMDMEFLYHVGYILTSVLGLFAHELFYSILLFDLIYREETLFNVIKSVTRNGRSILLTALLALILVYLFSIVGFLFLKDDFILEVDRLPNNHSTASPLGMPHGAAAFVDTCSGDKMDCVSGLSVPEVLEEDRELDSTERACDTLLMCIVTVMNHGLRNGGGVGDILRKPSKDESLFPARVVYDLLFFFIVIIIVLNLIFGVIIDTFADLRSEKQKKEEILKTTCFICGLERDKFDNKTVSFEEHIKLEHNMWNYLYFIVLVRVKNKTDYTGPESYVAQMIKNKNLDWFPRMRAMSLVSNEGEGEQNEIRILQDKLNSTMKLVSHLTAQLNELKEQMTEQRKRRQRLGFVDVQNCISR

SEQ ID NO: 3642 - protein, 114 aa, Homo sapiens
MVIRVYIASSSGSTAIKKKQQDVLGFLEANKIGFEEKDIAANEENRKWMRENVPENSRPATGYPLPPQIFNESQYRGDYDAFFEARENNAVYAFLGLTAPPGSKEAEVQAKQQA

SEQ ID NO: 3643 - protein, 1030 aa, Homo sapiens
MAAAAAVEAAAPMGALWGLVHDFVVGQQEGPADQVAADVKSGNYTVLQVVEALGSSLENPEPRTRARGIQLLSQVLLHCHTLLLEKEVVHLILFYENRLKDHHLVIPSVLQGLKALSLCVALPPGLAVSVLKAIFQEVHVQSLPQVDRHTVYNIITNFMRTREEELKSLGADFTFGFIHVMDGEKDPRNLLVAFRIVHDLISRDYSLGPFVEELFEVTSCYFPIDFTPPPNDPHGIQREDLILSLRAVLASTPRFAEFLLPLLIEKVDSEVLSAKLDSLQTLNACCAVYGQKELKDFLPSLWASIRREVFQTASERVEAEGLAALHSLTACLSRSVLRADAEDLLDSFLSNILQDCRHHLCEPDMKLVWPSAKLLQAAAGASARACDSDTSNVPPLLLEQFHKHSQSSQRRTILEMLLGFLKLQQKWSYEDKDQRPLNGFKDQLCSLVFMALTDPSTQLQLVGIRTLTVLGAQPDLLSYEDLELAVGHLYRLSFLKEDSQSCRVAALEASGTLAALYPVAFSSHLVPKLAEELRVGESNLTNGDEPTQCSRHLCCLQALSAVSTHPSIVKETLPLLLQHLWQVNRGNMVAQSSDVIAVCQSLRQMAEKCQQDPESCWYFHQTAIPCLLALAVQASMPEKEPSVLRKVLLEDEVLAAMVSVIGTATTHLSPELAAQSVTHIVPLFLDGNVSFLPENSFPSRFQPFQDGSSGQRRLIALLMAFVCSLPRNVEIPQLNQLMREFLELSCCHSCPFSSTAAAKCFAGLLNKHPAGQQLDEFLQLAVDKVEAGLGSGPCRSQAFTLLLWVTKALVLRYHPLSSCLTARLMGLLSDPELGPAAADGFSLLMSDCTDVLTRAGHAEVRIMFRQRFFTDNVPALVQGFHAAPQDVKPNYLKGLSHVLNRLPKPVLLPELPTLLSLLLEALSCPDCVVQLSTLSCLQPLLLEAPQVMSLHVDTLVTKFLNLSSSPSMAVRIAALQCMHALTRLPTPVLLPYKPQVIRALAKPLDDKKRLVRKEAVSARGEWFLLGSPGS

SEQ ID NO: 3644 - protein, 463 aa, Homo sapiens
MSGGTPYIGSKISLISKAEIRYEGILYTIDTENSTVALAKVRSFGTEDRPTDRPIPPRDEVFEYIIFRGSDIKDLTVCEPPKPQCSLPQDPAIVQSSLGSSTSSFQSMGSYGPFGRMPTYSQFSPSSLVGQQFGAVGVAGSSLTSFGTETSNSGTLPQSSAVGSAFTQDTRSLKTQLSQGRSSPQLDPLRKSPTMEQAVQTASAHLPAPAAVGRRSPVSTRPLPSASQKAGENQEHRQAEVHKVSRPENEQLRNDNKRQVAPGAPSAPRRGRGGHRGGRGRFGIRRDGPMKFEKDFDFESANAQFNKEEIDREFHNKLKLKEDKLEKQEKPVNGEDKGDSGVDTQNSEGNADEEDPLGPNCYYDKTKSFFDNISCDDNRERRPTWAEERRLNAETFGIPLRPNRGRGGYRGRGGLGFRGGRGRGGGRGGTFTAPRGFRGGFRGGRGGREFADFEYRKDNKVAA

SEQ ID NO: 3645 - protein, 782 aa, Homo sapiens
MQGEESLRILVEPEGDSFPLMEISTCETEASEQWDYVLVAQRHTQRDPRQARQQQFLEELRRKGFHIKVIRDQKQVFFGIRADNSVFGLYRTLLLEPEGPAPHAELAAPTTIPVTTSLRIRIVNFVVMNNKTSAGETFEDLMKDGVFEARFPLHKGEGRLKKTWARWRHMFREQPVDEIRNYFGEKVALYFVWLGWYTYMLVPAALTGLLVFLSGFSLFEASQISKEICEAHDILMCPLGDHSRRYQRLSETCTFAKLTHLFDNDGTVVFAIFMALWATVFLEIWKRQRARVVLHWDLYVWDEEQEEMALQLINCPDYKLRPYQHSYLRSTVILVLTLLMICLMIGMAHVLVVYRVLASALFSSSAVPFLEEQVTTAVVVTGALVHYVTIVIMTKINRRVALKLCDFEMPRTFSERESRFTIRFFTLQFFTHFSSLIYIAFILGRINGHPGKSTRLAGLWKLEECHASGCMMDLFVQMAIIMGLKQTLSNCVEYLVPWVTHKCRSLRASESGHLPRDPELRDWRRNYLLNPVNTFSLFDEFMEMMIQYGFTTIFVAAFPLAPLLALFSNLVEIRLDAIKMVWLQRRLVPRKAKDIGTWLQVLETIGVLAVIANGMVIAFTSEFIPRVVYKYRYSPCLKEGNSTVDCLKGYVNHSLSVFHTKDFQDPDGIEGSENVTLCRYRDYRNPPDYNFSEQFWFLLAIRLAFVILFEHVALCIKLIAAWFVPDIPQSVKNKVLEVKYQRLREKMWHGRQRLGGVGAGSRPPMPAHPTPASIFSARSTDV

SEQ ID NO: 3646 - protein, 81 aa, Homo sapiens
MTAHSFALPVIIFTTFWGLVGIAGPWFVPKGPNRGVIITMLVATAVCCYLFWLIAILAQLNPLFGPQLKNETIWYVRFLWE

SEQ ID NO: 3647 - protein, 172 aa, Homo sapiens
MLLLPPRPPHPRSSSPEAMDPPPPKAPPFPKAEGPSSTPSSAAGPRPPRLGRHLLIDANGVPYTYTVQLEEEPRGPPQREAPPGEPGPRKGYSCPECARVFASPLRLQSHRVSHSDLKPFTCGACGKAFKRSSHLSRHRATHRARAGPPHTCPLCPRRFQDAAELAQHVRLH

SEQ ID NO: 3648 - protein, 172 aa, Homo sapiens; identical to SEQ ID NO: 3647

SEQ ID NO: 3649 - protein, 450 aa, Homo sapiens
MEEPQKSYVNTMDLERDEPLKSTGPQISVSEFSCHCCYDILVNPTTLNCGHSFCRHCLALWWASSKKTECPECREKWEGFPKVSILLRDAIEKLFPDAIRLRFEDIQQNNDIVQSLAAFQKYGNDQIPLAPNTGRANQQMGGGFFSGVLTALTGVAVVLLVYHWSSRESEHDLLVHKAVAKWTAEEVVLWLEQLGPWASLYRERFLSERVNGRLLLTLTEEEFSKTPYTIENSSHRRAILMELERVKALGVKPPQNLWEYKAVNPGRSLFLLYALKSSPRLSLLYLYLFDYTDTFLPFIHTICPLQEDSSGEDIVTKLLDLKEPTWKQWREFLVKYSFLPYQLIAEFAWDWLEVHYWTSRFLIINAMLLSVLELFSFWRIWSRSELKTVPQRMWSHFWKVSTQGLFVAMFWPLIPQFVCNCLFYWALYFNPIINIDLVVKELRRLETQVL

SEQ ID NO: 3650 - protein, 469 aa, Homo sapiens
MEERMEMISERPKESMYSWNKTAEKSDFEAVEALMSMSCSWKSDFKKYVENRPVTPVSDLSEEENLLPGTPDFHTIPAFCLTPPYSPSDFEPSQVSNLMAPAPSTVHFKSLSDTAKPHIAAPFKEEEKSPVSAPKLPKAQATSVIRHTADAQLCNHQTCPMKAASILNYQNNSFRRRTHLNVEAARKNIPCAAVSPNRSKCERNTVADVDEKASAALYDFSVPSSETVICRSQPAPVSPQQKSVLVSPPAVSAGGVPPMPVICQMVPLPANNPVVTTVVPSTPPSQPPAVCPPVVFMGTQVPKGAVMFVVPQPVVQSSKPPVVSPNGTRLSPIAPAPGFSPSAAKVTPQIDSSRIRSHICSHPGCGKTYFKSSHLKAHTRTHTGEKPFSCSWKGCERRFARSDELSRHRRTHTGEKKFACPMCDRRFMRSDHLTKHARRHLSAKKLPNWQMEVSKLNDIALPPTPAPTQ

SEQ ID NO: 3651 - protein, 480 aa, Homo sapiens
MLNFGASLQQTAEERMEMISERPKESMYSWNKTAEKSDFEAVEALMSMSCSWKSDFKKYVENRPVTPVSDLSEEENLLPGTPDFHTIPAFCLTPPYSPSDFEPSQVSNLMAPAPSTVHFKSLSDTAKPHIAAPFKEEEKSPVSAPKLPKAQATSVIRHTADAQLCNHQTCPMKAASILNYQNNSFRRRTHLNVEAARKNIPCAAVSPNRSKCERNTVADVDEKASAALYDFSVPSSETVICRSQPAPVSPQQKSVLVSPPAVSAGGVPPMPVICQMVPLPANNPVVTTVVPSTPPSQPPAVCPPVVFMGTQVPKGAVMFVVPQPVVQSSKPPVVSPNGTRLSPIAPAPGFSPSAAKVTPQIDSSRIRSHICSHPGCGKTYFKSSHLKAHTRTHTGEKPFSCSWKGCERRFARSDELSRHRRTHTGEKKFACPMCDRRFMRSDHLTKHARRHLSAKKLPNWQMEVSKLNDIALPPTPAPTQ

SEQ ID NO: 3652 - protein, 190 aa, Homo sapiens
MAEKTQKSVKIAPGAVVCVESEIRGDVTIGPRTVIHPKARIIAEAGPIVIGEGNLIEEQALIINAYPDNITPDTEDPEPKPMIIGTNNVFEVGCYSQAMKMGDNNVIESKAYVGRNVILTSGCIIGACCNLNTFEVIPENTVIYGADCLRRVQTERPQPQTLQLDFLMKILPNYHHLKKTMKGSSTPVKN

SEQ ID NO: 3653 - protein, 172 aa, Homo sapiens
MSSKKAKTKTTKKRPQRATSNVFAMFDQSQIQEFKEAFNMIDQNRDGFIDKEDLHDMLASLGKNPTDAYLDAMMNEAPGPINFTMFLTMFGEKLNGTDPEDVIRNAFACFDEEATGTIQEDYLRELLTTMGDRFTDEEVDELYREAPIDKKGNFNYIEFTRILKHGAKDKDD

SEQ ID NO: 3654 - protein, 474 aa, Homo sapiens
MRRVVRQSKFRHVFGQAVKNDQCYDDIRVSRVTWDSSFCAVNPRFVAIIIEASGGGAFLVLPLHKTGRIDKSYPTVCGHTGPVLDIDWCPHNDQVIASGSEDCTVMVWQIPENGLTLSLTEPVVILEGHSKRVGIVAWHPTARNVLLSAGCDNAIIIWNVGTGEALINLDDMHSDMIYNVSWNRNGSLICTASKDKKVRVIDPRKQEIVAEKEKAHEGARPMRAIFLADGNVFTTGFSRMSERQLALWNPKNMQEPIALHEMDTSNGVLLPFYDPDTSIIYLCGKGDSSIRYFEITDESPYVHYLNTFSSKEPQRGMGYMPKRGLDVNKCEIARFFKLHERKCEPIIMTVPRKSDLFQDDLYPDTAGPEAALEAEEWFEGKNADPILISLKHGYIPGKNRDLKVVKKNILDSKPTANKKCDLISIPKKTTDTASVQNEAKLDEILKEIKSIKDTICNQDERISKLEQQMAKIAA

SEQ ID NO: 3655 - protein, 360 aa, Homo sapiens
MAPLGTTVLLWSLLRSSPGVERVCFRARIQPWHGGLLQPLPCSFEMGLPRRRFSSEAAESGSPETKKPTFMDEEVQSILTKMTGLNLQKTFKPAIQELKPPTYKLMTQAQLEEATRQAVEAAKVRLKMPPVLEERVPINDVLAEDKILEGTETTKYVFTDISYSIPHRERFIVVREPSGTLRKASWEERDRMIQVYFPKEGRKILTPIIFKEENLRTMYSQDRHVDVLNLCFAQFEPDSTEYIKVHHKTYEDIDKRGKYDLLRSTRYFGGMVWYFVNNKKIDGLLIDQIQRDLIDDATNLVQLYHVLHPDGQSAQGAKDQAAEGINLIKVFAKTEAQKGAYIELTLQTYQEALSRHSAAS

SEQ ID NO: 3656 - protein, 566 aa, Homo sapiens
MDEGGTPLLPDSLVYQIFLSLGPADVLAAGLVCRQWQAVSRDEFLWREQFYRYYQVARDVPRHPAAMSWYEEFQRLYDTVPCVEVQTLREHTDQVLHLSFSHSGYQFASCSKDCTVKIWSNDLTISLLHSADMRPYNWSYTQFSQFNKDDSLLLASGVFLGPHNSSSGEIAVISLDSFALLSRVRNKPYDVFGCWLTETSLISGNLHRIGDITSCSVLWLNNAFQDVESENVNVVKRLFKIQNLNASTVRTVMVADCSRFDSPDLLLEAGDPATSPCRIFDLGSDNEEVVAGPAPAHAKEGLRHFLDRVLEGRAQPQLSERMLETKVAELLAQGHTKPPERSATGAKSKYLIFTTGCLTYSPHQIGIKQILPHQMTTAGPVLGEGRGSDAFFDALDHVIDIHGHIIGMGLSPDNRYLYVNSRAWPNGAVVADPMQPPPIAEEIDLLVFDLKTMREVRRALRAHRAYTPNDECFFIFLDVSRDFVASGAEDRHGYIWDRHYNICLARLRHEDVVNSVVFSPQEQELLLTASDDATIKAWRSPRTMRVLQAPRPRPRTFFSWLASQRR

SEQ ID NO: 3657 - protein, 840 aa, Homo sapiens
MMSIQEKSKENSSKVTKKSDDKNSETEIQDSQKNLAKKSGPKETIKSQAKSSSESKINQPELETRMSTRSSKAASNDKATKSINKNTVTVRGYSQESTKKKLSQKKLVHENPKANEQLNRRSQRLQQLTEVSRRSLRSREIQGQVQAVKQSLPPTKKEQCSSTQSKSNKTSQKHVKRKVLEVKSDSKEDENLVINEVINSPKGKKRKVEHQTACACSSQCTQGSEKCPQKTTRRDETKPVPVTSEVKRSKMATSVVPKKNEMKKSVHTQVNTNTTLPKSPQPSVPEQSDNELEQAGKSKRGSILQLCEEIAGEIESDNVEVKKESSQMESVKEEKPTEIKLEETSVERQILHQKETNQDVQCNRFFPSRKTKPVKCILNGINSLAKKNSNWTKIKLSKFNSVQHNKLDSQVSPKLGLLRTSFSPPALEMHHPVTQSTFLGTKLHDRNITCQQEKMKEINSEEVKINDITVEINKTTERAPENCHLANEIKPSDPPLDNQMKHSFDSASNKNFSQCLESKLENSPVENVTAASTLLSQAKIDTGENKFPGSAPQQHSILSNQTSKSSDNRETPRNHSLPKCNSHLEITIPKDLKLKEAEKTDEKQLIIDAGQKRFGAVSCNVCGMLYTASNPEDETQHLLFHNQFISAVKYVGWKKERILAEYPDGRIIMVLPEDPKYALKKVDEIREMVDNDLGFQQAPLMCYSRTKTLLFISNDKKVVGCLIAEHIQWGYRVIEEKLPVIRSEEEKVRFERQKAWCCSTLPEPAICGISRIWVFSMMRRKKIASRMIECLRSNFIYGSYLSKEEIAFSDPTPDGKLFATQYCGTGQFLVYNFINGQNST

SEQ ID NO: 3658 - protein, 223 aa, Homo sapiens
MQWAVGRRWAWAALLLAVAAVLTQVVWLWLGTQSFVFQREEIAQLARQYAGLDHELAFSRLIVELRRLHPGHVLPDEELQWVFVNAGGWMGAMCLLHASLSEYVLLFGTALGSRGHSGRYWAEISDTIISGTFHQWREGTTKSEVFYPGETVVHGPGEATAVEWGPNTWMVEYGRGVIPSTLAFALADTVFSTQDFLTLFYTLRSYARGLRLELTTYLFGQDP

SEQ ID NO: 3659 - protein, 192 aa, Homo sapiens
MQWAVGRRWAWAALLLAVAAVLTQVVWLWLGTQSFVFQREEIAQLARQYAGLDHELAFSRLIVELRRLHPGHVLPDEELQWVFVNAGGWMGAMCLLHASLSEYVLLFGTALGSRGHSGETVVHGPGEATAVEWGPNTWMVEYGRGVIPSTLAFALADTVFSTQDFLTLFYTLRSYARGLRLELTTYLFGQDP

SEQ ID NO: 3660 - protein, 187 aa, Homo sapiens
MQWAVGRRWAWAALLLAVAAVLTQVVWLWLDHELAFSRLIEELQWVFVNAGGWMGAMCLLHASLSEYVLLFGTALGSRGHSGRYWAEISDTIISGTFHQWREGTTKSEVFYPGETVVHGPGEATAVEWGPNTWMVEYGRGVIPSTLAFALADTVFSTQDFLTLFYTLRSYARGLRLELTTYLFGQDP

SEQ ID NO: 3661 - protein, 199 aa, Homo sapiens
MSSGNAKIGHPAPNFKATAVMPDGQFKDISLSDYKGKYVVFFFYPLDFTFVCPTEIIAFSDRAEEFKKLNCQVIGASVDSHFCHLAWVNTPKKQGGLGPMNIPLVSDPKRTIAQDYGVLKADEGISFRGLFIIDDKGILRQITVNDLPVGRSVDETLRLVQAFQFTDKHGEVCPAGWKPGSDTIKPDVQKSKEYFSKQK

SEQ ID NO: 3662 - protein, 199 aa, Homo sapiens; identical to SEQ ID NO: 3661

SEQ ID NO: 3663 - protein, 199 aa, Homo sapiens; identical to SEQ ID NO: 3661

SEQ ID NO: 3664 - protein, 467 aa, Homo sapiens
MEPGTNSFRVEFPDFSSTILQKLNQQRQQGQLCDVSIVVQGHIFRAHKAVLAASSPYFCDQVLLKNSRRIVLPDVMNPRVFENILLSSYTGRLVMPAPEIVSYLTAASFLQMWHVVDKCTEVLEGNPTVLCQKLNHGSDHQSPSSSSYNGLVESFELGSGGHTDFPKAQELRDGENEEESTKDELSSQLTEHEYLPSNSSTEHDRLSTEMASQDGEEGASDSAEFHYTRPMYSKPSIMAHKRWIHVKPERLEQACEGMDVHATYDEHQVTESINTVQTEHTVQPSGVEEDFHIGEKKVEAEFDEQADESNYDEQVDFYGSSMEEFSGERSDGNLIGHRQEAALAAGYSENIEMVTGIKEEASHLGFSATDKLYPCQCGKSFTHKSQRDRHMSMHLGLRPYGCGVCGKKFKMKHHLVGHMKIHTGIKPYECNICAKRFMWRDSFHRHVTSCTKSYEAAKAEQNTTEAN

SEQ ID NO: 3665 - protein, 372 aa, Homo sapiens
MSTAALITLVRSGGNQVRRRVLLSSRLLQDDRRVTPTCHSSTSEPRCSRFDPDGSGSPATWDNFGIWDNRIDEPILLPPSIKYGKPIPKISLEKVGCASQIGKRKENEDRFDFAQLTDEVLYFAVYDGHGGPAAADFCHTHMEKCIMDLLPKEKNLETLLTLAFLEIDKAFSSHARLSADATLLTSGTTATVALLRDGIELVVASVGDSRAILCRKGKPMKLTIDHTPERKDEKERIKKCGGFVAWNSLGQPHVNGRLAMTRSIGDLDLKTSGVIAEPETKRIKLHHADDSFLVLTTDGINFMVNSQEICDFVNQCHDPNEAAHAVTEQAIQYGTEDNSTAVVVPFGAWGKYKNSEINFSFSRSFASSGRWA

SEQ ID NO: 3666 - protein, 1089 aa, Homo sapiens
MAVFDTPEEAFGVLRPVCVQLTKTQTVENVEHLQTRLQAVSDSALQELQQYILFPLRFTLKTPGPKRERLIQSVVECLTFVLSSTCVKEQELLQELFSELSACLYSPSSQKPAAVSEELKLAVIQGLSTLMHSAYGDIILTFYEPSILPRLGFAVSLLLGLAEQEKSKQIKIAALKCLQVLLLQCDCQDHPRSLDELEQKQLGDLFASFLPGISTALTRLITGDFKQGHSIVVSSLKIFYKTVSFIMADEQLKRISKVQAKPAVEHRVAELMVYREADWVKKTGDKLTILIKKIIECVSVHPHWKVRLELVELVEDLLLKCSQSLVECAGPLLKALVGLVNDESPEIQAQCNKVLRHFADQKVVVGNKALADILSESLHSLATSLPRLMNSQDDQGKFSTLSLLLGYLKLLGPKINFVLNSVAHLQRLSKALIQVLELDVADIKIVEERRWNSDDLNASPKTSATQPWNRIQRRYFRFFTDERIFMLLRQVCQLLGYYGNLYLLVDHFMELYHQSVVYRKQAAMILNELVTGAAGLEVEDLHEKHIKTNPEELREIVTSILEEYTSQENWYLVTCLETEEMGEELMMEHPGLQAITSGEHTCQVTSFLAFSKPSPTICSMNSNIWQICIQLEGIGQFAYALGKDFCLLLMSALYPVLEKAGDQTLLISQVATSTMMDVCRACGYDSLQHLINQNSDYLVNGISLNLRHLALHPHTPKVLEVMLRNSDANLLPLVADVVQDVLATLDQFYDKRAASFVSVLHALMAALAQWFPDTGNLGHLQEQSLGEEGSHLNQRPAALEKSTTTAEDIEQFLLNYLKEKDVADGNVSDFDNEEEEQSVPPKVDENDTRPDVEPPLPLQIQIAMDVMERCIHLLSDKNLQIRLKVLDVLDLCVVVLQSHKNQLLPLAHQAWPSLVHRLTRDAPLAVLRAFKVLRTLGSKCGDFLRSRFCKDVLPKLAGSLVTQAPISARAGPVYSHTLAFKLQLAVLQGLGPLCERLDLGEGDLNKVADACLIYLSVKQPVKLQEAARSVFLHLMKVDPDSTWFLLNELYCPVQFTPPHPSLHPVQLHGASGQQNPYTTNVLQLLKELQ

SEQ ID NO: 3667 - protein, 454 aa, Homo sapiens
MVFCLSSEEPRRPLRSDMVHFQASEVQQLLHNKFVVILGDSIQRAVYKDLVLLLQKDSLLTAAQLKAKGELSFEQDQLVAGGQLGELHNGTQYREVRQFCSGSGHHLVRFYFLTRVYSEYLEDVLEELTYGPAPDLVIINSCLWDLSRYGRCSMESYRENLERVFVRMDQVLPDSCLLVWNMAMPLGERITGGFLLPELQPLAGSLRRDVVEGNFYSATLAGDHCFDVLDLHFHFRHAVQHRHRDGVHWDQHAHRHLSHLLLTHVADAWGVELPKRGYPPDPWIEDWAEMNHPFQGSHRQTPDFGEHLALLPPPPSSLPPPMPFPYPLPQPSPPPLFPPLPQDTPFFPGQPFPPHEFFNYNPVEDFSMPPHLGCGPGVNFVPGPLPPPIPGPNPHGQHWGPVVHRGMPRYVPNSPYHVRRMGGPCRQRLRHSERLIHTYKLDRRPPAHSGTWPG

SEQ ID NO: 3668 - protein, 668 aa, Homo sapiens
MTERIHSINLHNFSNSVLETLNEQRNRGHFCDVTVRIHGSMLRAHRCVLAAGSPFFQDKLLLGYSDIEIPSVVSVQSVQKLIDFMYSGVLRVSQSEALQILTAASILQIKTVIDECTRIVSQNVGDVFPGIQDSGQDTPRGTPESGTSGQSSDTESGYLQSHPQHSVDRIYSALYACSMQNGSGERSFYSGAVVSHHETALGLPRDHHMEDPSWITRIHERSQQMERYLSTTPETTHCRKQPRPVRIQTLVGNIHIKQGMEDDYDYYGQQRVQILERNESEECTEDTDQAEGTESEPKGESFDSGVSSSIGTEPDSVEQQFGPGAARDSQAEPTQPEQAAEAPAEGGPQTNQLETGASSPERSNEVEMDSTVITVSNSSDKSVLQQPSVNTSIGQPLPSTQLYLRQTETLTSNLRMPLTLTSNTQVIGTAGNTYLPALFTTQPAGSGPKPFLFSLPQPLAGQQTQFVTVSQPGLSTFTAQLPAPQPLASSAGHSTASGQGEKKPYECTLCNKTFTAKQNYVKHMFVHTGEKPHQCSICWRSFSLKDYLIKHMVTHTGVRAYQCSICNKRFTQKSSLNVHMRLHRGEKSYECYICKKKFSHKTLLERHVALHSASNGTPPAGTPPGARAGPPGVVACTEGTTYVCSVCPAKFDQIEQFNDHMRMHVSDG

SEQ ID NO: 3669 - protein, 409 aa, Homo sapiens
MQVTLKTLQQQTFKIDIDPEETVKALKEKIESEKGKDAFPVAGQKLIYAGKILNDDTALKEYKIDEKNFVVVMVTKPKAVSTPAPATTQQSAPASTTAVTSSTTTTVAQAPTPVPALAPTSTPASITPASATASSEPAPASAAKQEKPAEKPAETPVATSPTATDSTSGDSSRSNLFEDATSALVTGQSYENMVTEIMSMGYEREQVIAALRASFNNPDRAVEYLLMGIPGDRESQAVVDPPQAASTGAPQSSAVAAAAATTTATTTTTSSGGHPLEFLRNQPQFQQMRQIIQQNPSLLPALLQQIGRENPQLLQQISQHQEHFIQMLNEPVQEAGGQGGGGGGGSGGIAEAGSGHMNYIQVTPQEKEAIERLKALGFPEGLVIQAYFACEKNENLAANFLLQQNFDED

SEQ ID NO: 3670 - protein, 346 aa, Homo sapiens
MPNSDIDLSNLERLEKYRSFDRYRRRAEQEAQAPHWWRTYREYFGEKTDPKEKIDIGLPPPKVSRTQQLLERKQAIQELRANVEEERAARLRTASVPLDAVRAEWERTCGPYHKQRLAEYYGLYRDLFHGATFVPRVPLHVAYAVGEDDLMPVYCGNEVTPTEAAQAPEVTYEAEEGSLWTLLLTSLDGHLLEPDAEYLHWLLTNIPGNRVAEGQVTCPYLPPFPARGSGIHRLAFLLFKQDQPIDFSEDARPSPCYQLAQRTFRTFDFYKKHQETMTPAGLSFFQCRWDDSVTYIFHQLLDMREPVFEFVRPPPYHPKQKRFPHRQPLRYLDRYRDSHEPTYGIY

SEQ ID NO: 3671 - protein, 394 aa, Homo sapiens
MDLCHPEPAELSSGETEELQRIKWHRKQLLEDIQKLKDEIADVFAQIDCFESAEESRMAQKEKELCIGRKKFNMDPAKGIQYFIEHKLLTPDVQDIARFLYKGEGLNKTAIGTYLGERDPINLQVLQAFVDCHEFANLNLVQALRQFLWSFRLPGEAQKIDRMMEAFATRYCLCNPGVFQSTDTCYVLSFSIIMLNTSLHNPNVRDRPPFERFVSMNRGINNGSDLPEDQLRNLFDSIKSEPFSIPEDDGNDLTHTFFNPDREGWLLKLGGRVKTWKRRWFILTDNCLYYFEFTTDKEPRGIIPLENLSVQKVDDPKKPFCLELYNPSCRGQKIKACKTDGDGRVVEGKHESYRISATSAEERDQWIESIRASITRVPFYDLVSTRKKKIASKQ

SEQ ID NO: 3672 - protein, 369 aa, Homo sapiens
MLKPSLPFTSLLFLQLPLLGVGLNTTILTPNGNEDTTADFFLTTMPTDSLSVSTLPLPEVQCFVFNVEYMNCTWNSSSEPQPTNLTLHYWYKNSDNDKVQKCSHYLFSEEITSGCQLQKKEIHLYQTFVVQLQDPREPRRQATQMLKLQNLVIPWAPENLTLHKLSESQLELNWNNRFLNHCLEHLVQYRTDWDHSWTEQSVDYRHKFSLPSVDGQKRYTFRVRSRFNPLCGSAQHWSEWSHPIHWGSNTSKENPFLFALEAVVISVGSMGLIISLLCVYFWLERTMPRIPTLKNLEDLVTEYHGNFSAWSGVSKGLAESLQPDYSERLCLVSEIPPKGGALGEGPGASPCNQHSPYWAPPCYTLKPET

SEQ ID NO: 3673 - protein, 1009 aa, Homo sapiens
MSGVSEPLSRVKLGTLRRPEGPAEPMVVVPVDVEKEDVRILKVCFYSNSFNPGKNFKLVKCTVQTEIREIITSILLSGRIGPNIRLAECYGLRLKHMKSDEIHWLHPQMTVGEVQDKYECLHVEAEWRYDLQIRYLPEDFMESLKEDRTTLLYFYQQLRNDYMQRYASKVSEGMALQLGCLELRRFFKDMPHNALDKKSNFELLEKEVGLDLFFPKQMQENLKPKQFRKMIQQTFQQYASLREEECVMKFFNTLAGFANIDQETYRCELIQGWNITVDLVIGPKGIRQLTSQDAKPTCLAEFKQIRSIRCLPLEEGQAVLQLGIEGAPQALSIKTSSLAEAENMADLIDGYCRLQGEHQGSLIIHPRKDGEKRNSLPQIPMLNLEARRSHLSESCSIESDIYAEIPDETLRRPGGPQYGIAREDVVLNRILGEGFFGEVYEGVYTNHKGEKINVAVKTCKKDCTLDNKEKFMSEAVIMKNLDHPHIVKLIGIIEEEPTWIIMELYPYGELGHYLERNKNSLKVLTLVLYSLQICKAMAYLESINCVHRDIAVRNILVASPECVKLGDFGLSRYIEDEDYYKASVTRLPIKWMSPESINFRRFTTASDVWMFAVCMWEILSFGKQPFFWLENKDVIGVLEKGDRLPKPDLCPPVLYTLMTRCWDYDPSDRPRFTELVCSLSDVYQMEKDIAMEQERNARYRTPKILEPTAFQEPPPKPSRPKYRPPPQTNLLAPKLQFQVPEGLCASSPTLTSPMEYPSPVNSLHTPPLHRHNVFKRHSMREEDFIQPSSREEAQQLWEAEKVKMRQILDKQQKQMVEDYQWLRQEEKSLDPMVYMNDKSPLTPEKEVGYLEFTGPPQKPPRLGAQSIQPTANLDRTDDLVYLNVMELVRAVLELKNELCQLPPEGYVVVVKNVGLTLRKLIGSVDDLLPSLPSSSRTEIEGTQKLLNKDLAELINKMRLAQQNAVTSLSEECKRQMLTASHTLAVDAKNLLDAVDQAKVLANLAHPPAE

SEQ ID NO: 3674 - protein, 1009 aa, Homo sapiens; identical to SEQ ID NO: 3673

SEQ ID NO: 3675 - protein, 967 aa, Homo sapiens
MSGVSEPLSRVKLGTLRRPEGPAEPMVVVPVDVEKEDVRILKVCFYSNSFNPGKNFKLVKCTVQTEIREIITSILLSGRIGPNIRLAECYGLRLKHMKSDEIHWLHPQMTVGEVQDKYECLHVEAEWRYDLQIRYLPEDFMESLKEDRTTLLYFYQQLRNDYMQRYASKVSEGMALQLGCLELRRFFKDMPHNALDKKSNFELLEKEVGLDLFFPKQMQENLKPKQFRKMIQQTFQQYASLREEECVMKFFNTLAGFANIDQETYRCELIQGWNITVDLVIGPKGIRQLTSQDAKPTCLAEFKQIRSIRCLPLEEGQAVLQLGIEGAPQALSIKTSSLAEAENMADLIDGYCRLQGEHQGSLIIHPRKDGEKRNSLPQIPMLNLEARRSHLSESCSIESDIYAEIPDETLRRPGGPQYGIAREDVVLNRILGEGFFGEVYEGVYTNHKGEKINVAVKTCKKDCTLDNKEKFMSEAVIMKNLDHPHIVKLIGIIEEEPTWIIMELYPYGELGHYLERNKNSLKVLTLVLYSLQICKAMAYLESINCVHRDIAVRNILVASPECVKLGDFGLSRYIEDEDYYKASVTRLPIKWMSPESINFRRFTTASDVWMFAVCMWEILSFGKQPFFWLENKDVIGVLEKGDRLPKPDLCPPVLYTLMTRCWDYDPSDRPRFTELVCSLSDVYQMEKDIAMEQERNARYRTPKILEPTAFQEPPPKPSRPKYRPPPQTNLLAPKLQFQEEDFIQPSSREEAQQLWEAEKVKMRQILDKQQKQMVEDYQWLRQEEKSLDPMVYMNDKSPLTPEKEVGYLEFTGPPQKPPRLGAQSIQPTANLDRTDDLVYLNVMELVRAVLELKNELCQLPPEGYVVVVKNVGLTLRKLIGSVDDLLPSLPSSSRTEIEGTQKLLNKDLAELINKMRLAQQNAVTSLSEECKRQMLTASHTLAVDAKNLLDAVDQAKVLANLAHPPAE

SEQ ID NO: 3676 - protein, 1009 aa, Homo sapiens; identical to SEQ ID NO: 3673

SEQ ID NO: 3677 - protein, 1042 aa, Homo sapiens
MPMWAGGVGSPRRGMAPASTDDLFARKLRQPARPPLTPHTFEPRPVRGPLLRSGSDAGEARPPTPASPRARAHSHEEASRPAATSTRLFTDPLALLGLPAEEPEPAFPPVLEPRWFAHYDVQSLLFDWAPRSQGMGSHSEASSGTLASAEDQAASSDLLHGAPGFVCELGGEGELGLGGPASPPVPPALPNAAVSILEEPQNRTSAYSLEHADLGAGYYRKYFYGKEHQNFFGMDESLGPVAVSLRREEKEGSGGGTLHSYRVIVRTTQLRTLRGTISEDALPPGPPRGLSPRKLLEHVAPQLSPSCLRLGSASPKVPRTLLTLDEQVVSFQRKVGILYCRAGQGSEEEMYNNQEAGPAFMQFLTLLGDVVRLKGFESYRAQLDTKTDSTGTHSLYTTYQDHEIMFHVSTMLPYTPNNQQQLLRKRHIGNDIVTIVFQEPGSKPFCPTTIRSHFQHVFLVVRAHTPCTPHTTYRVAVSRTQDTPAFGPALPAGGGPFAANADFRAFLLAKALNGEQAAGHARQFHAMATRTRQQYLQDLATNEVTTTSLDSASRFGLPSLGGRRRAAPRGPGAELQAAGSLVWGVRAAPGARVAAGAQASGPEGIEVPCLLGISAEALVLVAPRDGRVVFNCACRDVLAWTFSEQQLDLYHGRGEAITLRFDGSPGQAVGEVVARLQLVSRGCETRELALPRDGQGRLGFEVDAEGFVTHVERFTFAETAGLRPGARLLRVCGQTLPSLRPEAAAQLLRSAPKVCVTVLPPDESGRPHRSFSELYTLSLQEPSRRGAPDPVQDEVQGVTLLPTTKQLLHLCLQDGGSPPGPGDLAEERTEFLHSQNSLSPRSSLSDEAPVLPNTTPDLLLATTAKPSVPSADSETPLTQDRPGSPSGSEDKGNPAPELRASFLPRTLSLRNSISRIMSEAGSGTLEDEWQAISEIASTCNTILESLSREGQPIPESGDPKGTPKSDAEPEPGNLSEKVSHLESMLRKLQEDLQKEKADRAALEEEVRSLRHNNRRLQAESESAATRLLLASKQLGSPTADLA

SEQ ID NO: 3678 - protein, 1042 aa, Homo sapiens; identical to SEQ ID NO: 3677

SEQ ID NO: 3679 - protein, 328 aa, Homo sapiens
MDEAGSSASGGGFRPGVDSLDEPPNSRIFLVISKYTPESVLRERFSPFGDIQDIWVVRDKHTKESKGIAFVKFARSSQACRAMEEMHGQCLGPNDTKPIKVFIAQSRSSGSHRDVEDEELTRIFVMIPKSYTEEDLREKFKVYGDIEYCSIIKNKVTGESKGLGYVRYLKPSQAAQAIENCDRSFRAILAEPKNKASESSEQDYYSNMRQEALGHEPRVNMFPFEQQSEFSSFDKNDSRGQEAISKRLSVVSRVPFTEEQLFSIFDIVPGLEYCEVQRDPYSNYGHGVVQYFNVASAIYAKYKLHGFQYPPGNRIGVSFIDDGSNATE

SEQ ID NO: 3680 - protein, 244 aa, Homo sapiens
MGALGLEGRGGRLQGRGSLLLAVAGATSLVTLLLAVPITVLAVLALVPQDQGGLVTETADPGAQAQQGLGFQKLPEEEPETDLSPGLPAAHLIGAPLKGQGLGWETTKEQAFLTSGTQFSDAEGLALPQDGLYYLYCLVGYRGRAPPGGGDPQGRSVTLRSSLYRAGGAYGPGTPELLLEGAETVTPVLDPARRQGYGPLWYTSVGFGGLVQLRRGERVYVNISHPDMVDFARGKTFFGAVMVG

SEQ ID NO: 3681 - protein, 77 aa, Homo sapiens
MGALGLEGRGGRLQGRGSLLLAVAGATSLVTLLLAVPITVLAVLALVPQDQGGLGFRSCQRRSQKQISAPGSQLPTS

SEQ ID NO: 3682 - protein, 180 aa, Homo sapiens
MMPSKSLVMEYLAHPSTLGLAVGVACGMCLGWSLRVCFGMLPKSKTSKTHTDTESEASILGDSGEYKMILVVRNDLKMGKGKVAAQCSHAAVSAYKQIQRRNPEMLKQWEYCGQPKVVVKAPDEETLIALLAHAKMLGLTVSLIQDAGRTQIAPGSQTVLGIGPGPADLIDKVTGHLKLY

SEQ ID NO: 3683 - protein, 179 aa, Homo sapiens
MPSKSLVMEYLAHPSTLGLAVGVACGMCLGWSLRVCFGMLPKSKTSKTHTDTESEASILGDSGEYKMILVVRNDLKMGKGKVAAQCSHAAVSAYKQIQRRNPEMLKQWEYCGQPKVVVKAPDEETLIALLAHAKMLGLTVSLIQDAGRTQIAPGSQTVLGIGPGPADLIDKVTGHLKLY

SEQ ID NO: 3684 - protein, 537 aa, Homo sapiens
MGCVQCKDKEATKLTEERDGSLNQSSGYRYGTDPTPQHYPSFGVTSIPNYNNFHAAGGQGLTVFGGVNSSSHTGTLRTRGGTGVTLFVALYDYEARTEDDLSFHKGEKFQILNSSEGDWWEARSLTTGETGYIPSNYVAPVDSIQAEEWYFGKLGRKDAERQLLSFGNPRGTFLIRESETTKGAYSLSIRDWDDMKGDHVKHYKIRKLDNGGYYITTRAQFETLQQLVQHYSERAAGLCCRLVVPCHKGMPRLTDLSVKTKDVWEIPRESLQLIKRLGNGQFGEVWMGTWNGNTKVAIKTLKPGTMSPESFLEEAQIMKKLKHDKLVQLYAVVSEEPIYIVTEYMNKGSLLDFLKDGEGRALKLPNLVDMAAQVAAGMAYIERMNYIHRDLRSANILVGNGLICKIADFGLARLIEDNEYTARQGAKFPIKWTAPEAALYGRFTIKSDVWSFGILLTELVTKGRVPYPGMNNREVLEQVERGYRMPCPQDCPISLHELMIHCWKKDPEERPTFEYLQSFLEDYFTATEPQYQPGENL

SEQ ID NO: 3685 - protein, 534 aa, Homo sapiens
MGCVQCKDKEATKLTEERDGSLNQSSGYRYGTDPTPQHYPSFGVTSIPNYNNFHAAGGQGLTVFGGVNSSSHTGTLRTRGGTGVTLFVALYDYEARTEDDLSFHKGEKFQILNSSEGDWWEARSLTTGETGYIPSNYVAPVDSIQAEEWYFGKLGRKDAERQLLSFGNPRGTFLIRESETTKGAYSLSIRDWDDMKGDHVKHYKIRKLDNGGYYITTRAQFETLQQLVQHYSEKADGLCFNLTVIASSCTPQTSGLAKDAWEVARRSLCLEKKLGQGCFAEVWLGTWNGNTKVAIKTLKPGTMSPESFLEEAQIMKKLKHDKLVQLYAVVSEEPIYIVTEYMNKGSLLDFLKDGEGRALKLPNLVDMAAQVAAGMAYIERMNYIHRDLRSANILVGNGLICKIADFGLARLIEDNEYTARQGAKFPIKWTAPEAALYGRFTIKSDVWSFGILLTELVTKGRVPYPGMNNREVLEQVERGYRMPCPQDCPISLHELMIHCWKKDPEERPTFEYLQSFLEDYFTATEPQYQPGENL

SEQ ID NO: 3686 - protein, 482 aa, Homo sapiens
MGCVQCKDKEATKLTEERDGSLNQSSGYRYGTDPTPQHYPSFGVTSIPNYNNFHAAGGQGLTVFGGVNSSSHTGTLRTRGGTGVTLFVALYDYEARTEDDLSFHKGEKFQILNSSEGDWWEARSLTTGETGYIPSNYVAPVDSIQAEEWYFGKLGRKDAERQLLSFGNPRGTFLIRESETTKGAYSLSIRDWDDMKGDHVKHYKIRKLDNGGYYITTRAQFETLQQLVQHYSGTWNGNTKVAIKTLKPGTMSPESFLEEAQIMKKLKHDKLVQLYAVVSEEPIYIVTEYMNKGSLLDFLKDGEGRALKLPNLVDMAAQVAAGMAYIERMNYIHRDLRSANILVGNGLICKIADFGLARLIEDNEYTARQGAKFPIKWTAPEAALYGRFTIKSDVWSFGILLTELVTKGRVPYPGMNNREVLEQVERGYRMPCPQDCPISLHELMIHCWKKDPEERPTFEYLQSFLEDYFTATEPQYQPGENL

SEQ ID NO: 3687 - protein, 504 aa, Homo sapiens
MVLADLGRKITSALRSLSNATIINEEVLNAMLKEVCTALLEADVNIKLVKQLRENVKSAIDLEEMASGLNKRKMIQHAVFKELVKLVDPGVKAWTPTKGKQNVIMFVGLQGSGKTTTCSKLAYYYQRKGWKTCLICADTFRAGAFDQLKQNATKARIPFYGSYTEMDPVIIASEGVEKFKNENFEIIIVDTSGRHKQEDSLFEEMLQVANAIQPDNIVYVMDASIGQACEAQAKAFKDKVDVASVIVTKLDGHAKGGGALSAVAATKSPIIFIGTGEHIDDFEPFKTQPFISKLLGMGDIEGLIDKVNELKLDDNEALIEKLKHGQFTLRDMYEQFQNIMKMGPFSQILGMIPGFGTDFMSKGNEQESMARLKKLMTIMDSMNDQELDSTDGAKVFSKQPGRIQRVARGSGVSTRDVQELLTQYTKFAQMVKKMGGIKGLFKGGDMSKNVSQSQMAKLNQQMAKMMDPRVLHHMGGMAGLQSMMRQFQQGAAGNMKGMMGFNNM

SEQ ID NO: 3688 - protein, 368 aa, Homo sapiens
MAGPAEEAGAHCPESLWPLPPQVSPRVTYTRVSPGQAEDVTFLYHPCAHPWLKLQLALLAYACMANPSLTPDFSLTQDRPLVLTAWGLALEMAWVEPAWAAHWLMRRRRRKQRKKKAWIYCESLSGPAPSEPTPGRGRLCRRGCVQALALAFALRSWRPPGTEVTSQGPRQPSSSGAKRRRLRAALGPQPTRSALRFPSASPGSLKAKQSMAGIPGRESNAPSVPTVSLLPGAPGGNASSRTEAQVPNGQGSPGGCVCSSQASPAPRAAAPPRAARGPTPRTEEAAWAAMALTFLLVLLTLATLCTRLHRNFRRGESIYWGPTADSQDTVAAVLKRRLLQPSRRVKRSRRRPLLPPTPDSGPEGESSE

SEQ ID NO: 3689 - protein, 150 aa, Homo sapiens
MAARGVIAPVGESLRYAEYLQPSAKRPDADVDQQRLVRSLIAVGLGVAALAFAGRYAFRIWKPLEQVITETAKKISTPSFSSYYKGGFEQKMSRREAGLILGVSPSAGKAKIRTAHRRVMILNHPDKGGSPYVAAKINEAKDLLETTTKH

SEQ ID NO: 3690 - protein, 329 aa, Homo sapiens
MAWRGWAQRGWGCGQAWGASVGGRSCEELTAVLTPPQLLGRRFNFFIQQKCGFRKAPRKVEPRRSDPGTSGEAYKRSALIPPVEETVFYPSPYPIRSLIKPLFFTVGFTGCAFGSAAIWQYESLKSRVQSYFDGIKADWLDSIRPQKEGDFRKEINKWWNNLSDGQRTVTGIIAANVLVFCLWRVPSLQRTMIRYFTSNPASSVISNFVSYVGKVATGRYGPSLGASGAIMTVLAAVCTKIPEGRLAIIFLPMFTFTAGNALKAIIAMDTAGMILGWKFFDHAAHLGGALFGIWYVTYGHELIWKNREPLVKIWHEIRTNGPKKGGGSK

SEQ ID NO: 3691 - protein, 379 aa, Homo sapiens
MAWRGWAQRGWGCGQAWGASVGGRSCEELTAVLTPPQLLGRRFNFFIQQKCGFRKAPRKVEPRRSDPGTSGEAYKRSALIPPVEETVFYPSPYPIRSLIKPLFFTVGFTGCAFGSAAIWQYESLKSRVQSYFDGIKADWLDSIRPQKEGDFRKEINKWWNNLSDGQRTVTGIIAANVLVFCLWRVPSLQRTMIRYFTSNPASKVLCSPMLLSTFSHFSLFHMAANMYVLWSFSSSIVNILGQEQFMAVYLSAGVISNFVSYVGKVATGRYGPSLGASGAIMTVLAAVCTKIPEGRLAIIFLPMFTFTAGNALKAIIAMDTAGMILGWKFFDHAAHLGGALFGIWYVTYGHELIWKNREPLVKIWHEIRTNGPKKGGGSK

SEQ ID NO: 3692 - protein, 948 aa, Homo sapiens
MEEKEMLRRQIRLLQGLIDDYKTLHGNAPAPGTPAASGWQPPTYHSGRAFSARYPRPSRRGYSSHHGPSWRKKYSLVNRPPGPSDPPADHAVRPLHGARGGRPPVPQQHVLERQVQLSQGQNVVIKVKPPSKSGSASASGAQRGSLEEFEETPWSDQRPREGEGKPPRGQLQPSRPTRARGTCSVEDPLLVCQKEPGKPRMVKSVGSVGDSPREPRRTVSESVIAVKASFASSALPPRTGVALGRKLGSHSVASCAPQLLGDRRVDAGHTDQPVPSGSVGGPARPASGPRQAREASLVVTCRTNKFRKNNYKWVAASSKSPRVARRALSPRVAAENVCKASAGMANKVEKPQLIADPEPKPRKPATSSKPGSAPSKYKWKASSPSASSSSSFRWQSEASSKDHASQLSPVLSRSPSGDRPAVGHSGLKPLSGETPLSAYKVKSRTKIIRRRGSTSLPGDKKSGTSPAATAKSHLSLRRRQALRGKSSPVLKKTPNKGLVQVTTHRLCRLPPSRAHLPTKEASSLHAVRTAPTSKVIKTRYRIVKKTPASPLSAPPFPLSLPSWRARRLSLSGSLVLNHLRPVASGGGKAQPGSPWWRSKGYRCIGGVLYKVSANKLSKTSGQPSDAGSRPLLRTGWLDPAGSCSRSLASRAVQRSLAIIRQARQRREKRKEYCMYYNRFGRCNRGERCPYIHDPEKVAVCTRFVRGTCKKTDGTCPFSHHVSKEKMRVCSYFLKGICSNSNCPYSHVYVSRKAEVCSDFLKGYCPLGAKCKKKHTLLCPDFARRGACPRGAQCQLLHRTQKRHSRRAATSPAPGPSDATARSRVSASHGPRKPSASQRPTRQTPSSAALTAAAVAAPPHCPGGSASPSSSKASSSSSSSSSPPASLDHEAPSLQEAALAAACSNRLCKLPSFISLQSSPSPGAQPRVRAPRAPLTKDSGKPLHIKPRL

SEQ ID NO: 3693 - protein, 202 aa, Homo sapiens
MDPASGEGEGRGWGGRRRRRGLFFILASPFPPHLRAAAARRAGPGCGGESSGQASRPGPVPAPAPAPSPRRRRAPAAGLPLPSRLAAFSKHRRGSAAASGRAPSRAEDRRPSRASPARPALFAAPARRDVRLGRRIFGRVRAGVMLFAPPRVAPNAGYWVGGCGWKALRWRWAWPVARAGGAVARRAPSFSRRGRRPPRTSR

SEQ ID NO: 3694 - protein, 879 aa, Homo sapiens
MRNRGQGLFRLRSRCFLHQSLPLGAGRRKGLDVAEPGPSRCRSDSPAVAAVVPAMASYPSGSGKPKAKYPFKKRASLQASTAAPEARGGLGAPPLQSARSLPGPAPCLKHFPLDLRTSMDGKCKEIAEELFTRSLAESELRSAPYEFPEESPIEQLEERRQRLERQISQDVKLEPDILLRAKQDFLKTDSDSDLQLYKEQGEGQGDRSLRERDVLEREFQRVTISGEEKCGVPFTDLLDAAKSVVRALFIREKYMALSLQSFCPTTRRYLQQLAEKPLETRTYEQGPDTPVSADAPVHPPALEQHPYEHCEPSTMPGDLGLGLRMVRGVVHVYTRREPDEHCSEVELPYPDLQEFVADVNVLMALIINGPIKSFCYRRLQYLSSKFQMHVLLNEMKELAAQKKVPHRDFYNIRKVDTHIHASSCMNQKHLLRFIKRAMKRHLEEIVHVEQGREQTLREVFESMNLTAYDLSVDTLDVHADRNTFHRFDKFNAKYNPIGESVLREIFIKTDNRVSGKYFAHIIKEVMSDLEESKYQNAELRLSIYGRSRDEWDKLARWAVMHRVHSPNVRWLVQVPRLFDVYRTKGQLANFQEMLENIFLPLFEATVHPASHPELHLFLEHVDGFDSVDDESKPENHVFNLESPLPEAWVEEDNPPYAYYLYYTFANMAMLNHLRRQRGFHTFVLRPHCGEAGPIHHLVSAFMLAENISHGLLLRKAPVLQYLYYLAQIGIAMSPLSNNSLFLSYHRNPLPEYLSRGLMVSLSTDDPLQFHFTKEPLMEEYSIATQVWKLSSCDMCELARNSVLMSGFSHKVKSHWLGPNYTKEGPEGNDIRRTNVPDIRVGYRYETLCQELALITQAVQSEMLETIPEEAGITMSPGPQ

SEQ ID NO: 3695 - protein, 798 aa, Homo sapiens
MASEARGGLGAPPLQSARSLPGPAPCLKHFPLDLRTSMDGKCKEIAEELFTRSLAESELRSAPYEFPEESPIEQLEERRQRLERQISQDVKLEPDILLRAKQDFLKTDSDSDLQLYKEQGEGQGDRSLRERDVLEREFQRVTISGEEKCGVPFTDLLDAAKSVVRALFIREKYMALSLQSFCPTTRRYLQQLAEKPLETRTYEQGPDTPVSADAPVHPPALEQHPYEHCEPSTMPGDLGLGLRMVRGVVHVYTRREPDEHCSEVELPYPDLQEFVADVNVLMALIINGPIKSFCYRRLQYLSSKFQMHVLLNEMKELAAQKKVPHRDFYNIRKVDTHIHASSCMNQKHLLRFIKRAMKRHLEEIVHVEQGREQTLREVFESMNLTAYDLSVDTLDVHADRNTFHRFDKFNAKYNPIGESVLREIFIKTDNRVSGKYFAHIIKEVMSDLEESKYQNAELRLSIYGRSRDEWDKLARWAVMHRVHSPNVRWLVQVPRLFDVYRTKGQLANFQEMLENIFLPLFEATVHPASHPELHLFLEHVDGFDSVDDESKPENHVFNLESPLPEAWVEEDNPPYAYYLYYTFANMAMLNHLRRQRGFHTFVLRPHCGEAGPIHHLVSAFMLAENISHGLLLRKAPVLQYLYYLAQIGIAMSPLSNNSLFLSYHRNPLPEYLSRGLMVSLSTDDPLQFHFTKEPLMEEYSIATQVWKLSSCDMCELARNSVLMSGFSHKVKSHWLGPNYTKEGPEGNDIRRTNVPDIRVGYRYETLCQELALITQAVQSEMLETIPEEAGITMSPGPQ

SEQ ID NO: 3696 - protein, 760 aa, Homo sapiens
MLTFLPSPQELFTRSLAESELRSAPYEFPEESPIEQLEERRQRLERQISQDVKLEPDILLRAKQDFLKTDSDSDLQLYKEQGEGQGDRSLRERDVLEREFQRVTISGEEKCGVPFTDLLDAAKSVVRALFIREKYMALSLQSFCPTTRRYLQQLAEKPLETRTYEQGPDTPVSADAPVHPPALEQHPYEHCEPSTMPGDLGLGLRMVRGVVHVYTRREPDEHCSEVELPYPDLQEFVADVNVLMALIINGPIKSFCYRRLQYLSSKFQMHVLLNEMKELAAQKKVPHRDFYNIRKVDTHIHASSCMNQKHLLRFIKRAMKRHLEEIVHVEQGREQTLREVFESMNLTAYDLSVDTLDVHADRNTFHRFDKFNAKYNPIGESVLREIFIKTDNRVSGKYFAHIIKEVMSDLEESKYQNAELRLSIYGRSRDEWDKLARWAVMHRVHSPNVRWLVQVPRLFDVYRTKGQLANFQEMLENIFLPLFEATVHPASHPELHLFLEHVDGFDSVDDESKPENHVFNLESPLPEAWVEEDNPPYAYYLYYTFANMAMLNHLRRQRGFHTFVLRPHCGEAGPIHHLVSAFMLAENISHGLLLRKAPVLQYLYYLAQIGIAMSPLSNNSLFLSYHRNPLPEYLSRGLMVSLSTDDPLQFHFTKEPLMEEYSIATQVWKLSSCDMCELARNSVLMSGFSHKVKSHWLGPNYTKEGPEGNDIRRTNVPDIRVGYRYETLCQELALITQAVQSEMLETIPEEAGITMSPGPQ

SEQ ID NO: 3697 - protein, 827 aa, Homo sapiens
MRGCLRLALLCALPWLLLAASPGHPAKSPRQPPAPRRDPFDAARGADFDHVYSGVVNLSTENIYSFNYTSQPDQVTAVRVYVNSSSENLNYPVLVVVRQQKEVLSWQVPLLFQGLYQRSYNYQEVSRTLCPSEATNETGPLQQLIFVDVASMAPLGAQYKLLVTKLKHFQLRTNVAFHFTASPSQPQYFLYKFPKDVDSVIIKVVSEMAYPCSVVSVQNIMCPVYDLDHNVEFNGVYQSMTKKAAITLQKKDFPGEQFFVVFVIKPEDYACGGSFFIQEKENQTWNLQRKKNLEVTIVPSIKESVYVKSSLFSVFIFLSFYLGCLLVGFVHYLRFQRKSIDGSFGSNDGSGNMVASHPIAASTPEGSNYGTIDESSSSPGRQMSSSDGGPPGQSDTDSSVEESDFDTMPDIESDKNIIRTKMFLYLSDLSRKDRRIVSKKYKIYFWNIITIAVFYALPVIQLVITYQTVVNVTGNQDICYYNFLCAHPLGVLSAFNNILSNLGHVLLGFLFLLIVLRRDILHRRALEAKDIFAVEYGIPKHFGLFYAMGIALMMEGVLSACYHVCPNYSNFRFDTSFMYMIAGLCMLKLYQTRHPDINASAYSAYASFAVVIMVTVLGVVFGKNDVWFWVIFSAIHVLASLALSTQIYYMGRFKIDLGIFRRAAMVFYTDCIQQCSRPLYMDRMVLLVVGNLVNWSFALFGLIYRPRDFASYMLGIFICNLLLYLAFYIIMKLRSSEKVLPVPLFCIVATAVMWAAALYFFFQNLSSWEGTPAESREKNRECILLDFFDDHDIWHFLSATALFFSFLVLLTLDDDLDVVRRDQIPVF

SEQ ID NO: 3698 - protein, 70 aa, Homo sapiens
MSEKKQPVDLGLLEEDDEFEEFPAEDWAGLDEDEDAHVWEDNWDDDNVEDDFSNQLRAELEKHGYKMETS

SEQ ID NO: 3699 - protein, 454 aa, Homo sapiens
MFLAQRSLCSLSGRAKFLKTISSSKILGFSTSAKMSLKFTNAKRIEGLDSNVWIEFTKLAADPSVVNLGQGFPDISPPTYVKEELSKIAAIDSLNQYTRGFGHPSLVKALSYLYEKLYQKQIDSNKEILVTVGAYGSLFNTIQALIDEGDEVILIVPFYDCYEPMVRMAGATPVFIPLRSKPVYGKRWSSSDWTLDPQELESKFNSKTKAIILNTPHNPLGKVYNREELQVIADLCIKYDTLCISDEVYEWLVYSGNKHLKIATFPGMWERTITIGSAGKTFSVTGWKLGWSIGPNHLIKHLQTVQQNTIYTCATPLQEALAQAFWIDIKRMDDPECYFNSLPKELEVKRDRMVRLLESVGLKPIVPDGGYFIIADVSLLDPDLSDMKNNEPYDYKFVKWMTKHKKLSAIPVSAFCNSETKSQFEKFVRFCFIKKDSTLDAAEEIIKAWSVQKS

SEQ ID NO: 3700 - protein, 420 aa, Homo sapiens
MSLKFTNAKRIEGLDSNVWIEFTKLAADPSVVNLGQGFPDISPPTYVKEELSKIAAIDSLNQYTRGFGHPSLVKALSYLYEKLYQKQIDSNKEILVTVGAYGSLFNTIQALIDEGDEVILIVPFYDCYEPMVRMAGATPVFIPLRSKPVYGKRWSSSDWTLDPQELESKFNSKTKAIILNTPHNPLGKVYNREELQVIADLCIKYDTLCISDEVYEWLVYSGNKHLKIATFPGMWERTITIGSAGKTFSVTGWKLGWSIGPNHLIKHLQTVQQNTIYTCATPLQEALAQAFWIDIKRMDDPECYFNSLPKELEVKRDRMVRLLESVGLKPIVPDGGYFIIADVSLLDPDLSDMKNNEPYDYKFVKWMTKHKKLSAIPVSAFCNSETKSQFEKFVRFCFIKKDSTLDAAEEIIKAWSVQKS

SEQ ID NO: 3701 - protein, 600 aa, Homo sapiens
MPEIRVTPLGAGQDVGRSCILVSIAGKNVMLDCGMHMGFNDDRRFPDFSYITQNGRLTDFLDCVIISHFHLDHCGALPYFSEMVGYDGPIYMTHPTQAICPILLEDYRKIAVDKKGEANFFTSQMIKDCMKKVVAVHLHQTVQVDDELEIKAYYAGHVLGAAMFQIKVGSESVVYTGDYNMTPDRHLGAAWIDKCRPNLLITESTYATTIRDSKRCRERDFLKKVHETVERGGKVLIPVFALGRAQELCILLETFWERMNLKVPIYFSTGLTEKANHYYKLFIPWTNQKIRKTFVQRNMFEFKHIKAFDRAFADNPGPMVVFATPGMLHAGQSLQIFRKWAGNEKNMVIMPGYCVQGTVGHKILSGQRKLEMEGRQVLEVKMQVEYMSFSAHADAKGIMQLVGQAEPESVLLVHGEAKKMEFLKQKIEQELRVNCYMPANGETVTLPTSPSIPVGISLGLLKREMAQGLLPEAKKPRLLHGTLIMKDSNFRLVSSEQALKELGLAEHQLRFTCRVHLHDTRKEQETALRVYSHLKSVLKDHCVQHLPDGSVTVESVLLQAAAPSEDPGTKVLLVSWTYQDEELGSFLTSLLKKGLPQAPS

SEQ ID NO: 3702 - protein, 278 aa, Homo sapiens
MPEIRVTPLGAGQDVGRSCILVSIAGKNVMLDCGMHMGFNDDRRFPDFSYITQNGRLTDFLDCVIISHFHLDHCGALPYFSEMVGYDGPIYMTHPTQAICPILLEDYRKIAVDKKGEANFFTSQMIKDCMKKVVAVHLHQTVQIKVGSESVVYTGDYNMTPDRHLGAAWIDKCRPNLLITESTYATTIRDSKRCRERDFLKKVHETVERGGKVLIPVFALGRAQEHLHPPGDLLGAHEPEGAHLLLHGADREGQPLLQAVHPLDQPEDPQDFRAEEHV

SEQ ID NO: 3703 - protein, 1356 aa, Homo sapiens
MDLKEKHLGEPPSALGLSTRKALSVLKEQLEAVLEGHLRERKKCLTWKEVWRSSFLHHSNRCSCFHWPGASLMLLAVLLLLGCCGGQPAGSRGVGLVNASALFLLLLLNLVLIGRQDRLKRREVERRLRGIIDQIQDALRDGREIQWPSAMYPDLHMPFAPSWSLHWAYRDGHLVNLPVSLLVEGDIIALRPGQESFASLRGMKDDEHIVLEPGDLFPPFSPPPSPRGEVERGPQSPQQHRLFRVLETPVIDNIRWCLDMALSRPVTALDNERFTVQSVMLHYAVPVVLAGFLITNALRFIFSAPGVTSWQYTLLQLQVNGVLPILPLLFPVLWVLATACGEARVLAQMSKASPSSLLAKFSEDTLSSYTEAVSSQEMLRCIWGHFLRVLGGTSPTLSHSSSLLHSLGSVTVLCCVDKQGILSWPNPSPETVLFFSGKVEPPHSSHEDLTDGLSTRSFCHPEPHERDALLAGSLNNTLHLSNEQERGDWPGEAPKPPEPYSHHKAHGRSKHPSGSNVSFSRDTEGGEEEPSKTQPGMESDPYEAEDFVCDYHLEMLSLSQDQQNPSCIQFDDSNWQLHLTSLKPLGLNVLLNLCDASVTERLCRFSDHLCNIALQESHSAVLPVHVPWGLCELARLIGFTPGAKELFKQENHLALYRLPSAETMKETSLGRLSCVTKRRPPLSHMISLFIKDTTTSTEQMLSHGTADVVLEACTDFWDGADIYPLSGSDRKKVLDFYQRACLSGYCSAFAYKPMNCALSSQLNGKCIELVQVPGQSSIFTMCELPSTIPIKQNARRSSWSSDEGIGEVLEKEDCMQALSGQIFMGMVSSQYQARLDIVRLIDGLVNACIRFVYFSLEDELKSKVFAEKMGLETGWNCHISLTPNGDMPGSEIPPSSPSHAGSLHDDLNQVSRDDAEGLLLMEEEGHSDLISFQPTDSDIPSFLEDSNRAKLPRGIHQVRPHLQNIDNVPLLVPLFTDCTPETMCEMIKIMLEYGEVTCCLGSSANLRNSCLFLQSDISIALDPLYPSRCSWETFGYATSISMAQASDGLSPLQLSGQLNSLPCSLTFRQEETISIIRLIEQARHATYGIRKCFLFLLQCQLTLVVIQFLSCLVQLPPLLSTTDILWLSCFCYPLLSISLLGKPPHSSIMSMATGKNLQSIPKKTQHYFLLCFLLKFSLTISSCLICFGFTLQSFCDSSRDRNLTNCSSVMLPSNDDRAPAWFEDFANGLLSAQKLTAALIVLHTVFISITHVHRTKPLWRKSPLTNLWWAVTVPVVLLGQVVQTAVDLQLWTHRDSHVHFGLEDVPLLTWLLGCLSLVLVVVTNEIVKLHEIRVRVRYQKRQKLQFETKLGMNSPF

SEQ ID NO: 3704 - protein, 1101 aa, Homo sapiens
MSAKAISEQTGKELLYKFICTTSAIQNRFKYARVTPDTDWARLLQDHPWLLSQNLVVKPDQLIKRRGKLGLVGVNLTLDGVKSWLKPRLGQEATVGKATGFLKNFLIEPFVPHSQAEEFYVCIYATREGDYVLFHHEGGVDVGDVDAKAQKLLVGVDEKLNPEDIKKHLLVHAPEDKKEILASFISGLFNFYEDLYFTYLEINPLVVTKDGVYVLDLAAKVDATADYICKVKWGDIEFPPPFGREAYPEEAYIADLDAKSGASLKLTLLNPKGRIWTMVAGGGASVVYSDTICDLGGVNELANYGEYSGAPSEQQTYDYAKTILSLMTREKHPDGKILIIGGSIANFTNVAATFKGIVRAIRDYQGPLKEHEVTIFVRRGGPNYQEGLRVMGEVGKTTGIPIHVFGTETHMTAIVGMALGHRPIPNQPPTAAHTANFLLNASGSTSTPAPSRTASFSESRADEVAPAKKAKPAMPQDSVPSPRSLQGKSTTLFSRHTKAIVWGMQTRAVQGMLDFDYVCSRDEPSVAAMVYPFTGDHKQKFYWGHKEILIPVFKNMADAMRKHPEVDVLINFASLRSAYDSTMETMNYAQIRTIAIIAEGIPEALTRKLIKKADQKGVTIIGPATVGGIKPGCFKIGNTGGMLDNILASKLYRPGSVAYVSRSGGMSNELNNIISRTTDGVYEGVAIGGDRYPGSTFMDHVLRYQDTPGVKMIVVLGEIGGTEEYKICRGIKEGRLTKPIVCWCIGTCATMFSSEVQFGHAGACANQASETAVAKNQALKEAGVFVPRSFDELGEIIQSVYEDLVANGVIVPAQEVPPPTVPMDYSWARELGLIRKPASFMTSICDERGQELIYAGMPITEVFKEEMGIGGVLGLLWFQKRLPKYSCQFIEMCLMVTADHGPAVSGAHNTIICARAGKDLVSSLTSGLLTIGDRFGGALDAAAKMFSKAFDSGIIPMEFVNKMKKEGKLIMGIGHRVKSINNPDMRVQILKDYVRQHFPATPLLDYALEVEKITTSKKPNLILNVDGLIGVAFVDMLRNCGSFTREEADEYIDIGALNGIFVLGRSMGFIGHYLDQKRLKQGLYRHPWDDISYVLPEHMSM

SEQ ID NO: 3705 - protein, 1091 aa, Homo sapiens
MSAKAISEQTGKELLYKFICTTSAIQNRFKYARVTPDTDWARLLQDHPWLLSQNLVVKPDQLIKRRGKLGLVGVNLTLDGVKSWLKPRLGQEATVGKATGFLKNFLIEPFVPHSQAEEFYVCIYATREGDYVLFHHEGGVDVGDVDAKAQKLLVGVDEKLNPEDIKKHLLVHAPEDKKEILASFISGLFNFYEDLYFTYLEINPLVVTKDGVYVLDLAAKVDATADYICKVKWGDIEFPPPFGREAYPEEAYIADLDAKSGASLKLTLLNPKGRIWTMVAGGGASVVYSDTICDLGGVNELANYGEYSGAPSEQQTYDYAKTILSLMTREKHPDGKILIIGGSIANFTNVAATFKGIVRAIRDYQGPLKEHEVTIFVRRGGPNYQEGLRVMGEVGKTTGIPIHVFGTETHMTAIVGMALGHRPIPNQPPTAAHTANFLLNASGSTSTPAPSRTASFSESRADEVAPAKKAKPAMPQGKSTTLFSRHTKAIVWGMQTRAVQGMLDFDYVCSRDEPSVAAMVYPFTGDHKQKFYWGHKEILIPVFKNMADAMRKHPEVDVLINFASLRSAYDSTMETMNYAQIRTIAIIAEGIPEALTRKLIKKADQKGVTIIGPATVGGIKPGCFKIGNTGGMLDNILASKLYRPGSVAYVSRSGGMSNELNNIISRTTDGVYEGVAIGGDRYPGSTFMDHVLRYQDTPGVKMIVVLGEIGGTEEYKICRGIKEGRLTKPIVCWCIGTCATMFSSEVQFGHAGACANQASETAVAKNQALKEAGVFVPRSFDELGEIIQSVYEDLVANGVIVPAQEVPPPTVPMDYSWARELGLIRKPASFMTSICDERGQELIYAGMPITEVFKEEMGIGGVLGLLWFQKRLPKYSCQFIEMCLMVTADHGPAVSGAHNTIICARAGKDLVSSLTSGLLTIGDRFGGALDAAAKMFSKAFDSGIIPMEFVNKMKKEGKLIMGIGHRVKSINNPDMRVQILKDYVRQHFPATPLLDYALEVEKITTSKKPNLILNVDGLIGVAFVDMLRNCGSFTREEADEYIDIGALNGIFVLGRSMGFIGHYLDQKRLKQGLYRHPWDDISYVLPEHMSM

SEQ ID NO: 3706 - protein, 321 aa, Homo sapiens
MAMATKGGTVKAASGFNAMEDAQTLRKAMKGLGTDEDAIISVLAYRNTAQRQEIRTAYKSTIGRDLIDDLKSELSGNFEQVIVGMMTPTVLYDVQELRRAMKGAGTDEGCLIEILASRTPEEIRRISQTYQQQYGRSLEDDIRSDTSFMFQRVLVSLSAGGRDEGNYLDDALVRQDAQDLYEAGEKKWGTDEVKFLTVLCSRNRNHLLHVFDEYKRISQKDIEQSIKSETSGSFEDALLAIVKCMRNKSAYFAEKLYKSMKGLGTDDNTLIRVMVSRAEIDMLDIRAHFKRLYGKSLYSFIKGDTSGDYRKVLLVLCGGDD

SEQ ID NO: 3707 - protein, 330 aa, Homo sapiens
MLPDWKSSLILMAYIIIFLTGLPANLLALRAFVGRIRQPQPAPVHILLLSLTLADLLLLLLLPFKIIEAASNFRWYLPKVVCALTSFGFYSSIYCSTWLLAGISIERYLGVAFPVQYKLSRRPLYGVIAALVAWVMSFGHCTIVIIVQYLNTTEQVRSGNEITCYENFTDNQLDVVLPVRLELCLVLFFIPMAVTIFCYWRFVWIMLSQPLVGAQRRRRAVGLAVVTLLNFLVCFGPYNVSHLVGYHQRKSPWWRSIAVVFSSLNASLDPLLFYFSSSVVRRAFGRGLQVLRNQGSSLLGRRGKDTAEGTNEDRGVGQGEGMPSSDFTTE

SEQ ID NO: 3708 - protein, 415 aa, Homo sapiens
MASRWWRWRRGCSWKPAARSPGPGSPGRAGPLGPSAAAEVRAQVHRRKGLDLSQIPYINLVKHLTSACPNVCRISRFHHTTPDSKTHSGEKYTDPFKLGWRDLKGLYEDIRKELLISTSELKEMSEYYFDGKGKAFRPIIVALMARACNIHHNNSRHVQASQRAIALIAEMIHTASLVHDDVIDDASSRRGKHTVNKIWGEKKAVLAGDLILSAASIALARIGNTTVISILTQVIEDLVRGEFLQLGSKENENERFAHYLEKTFKKTASLIANSCKAVSVLGCPDPVVHEIAYQYGKNVGIAFQLIDDVLDFTSCSDQMGKPTSADLKLGLATGPVLFACQQFPEMNAMIMRRFSLPGDVDRARQYVLQSDGVQQTTYLAQQYCHEAIREISKLRPSPERDALIQLSEIVLTRDK

SEQ ID NO: 3709 - protein, 914 aa, Homo sapiens
MASESSPLLAYRLLGEEGVALPANGAGGPGGASARKLSTFLGVVVPTVLSMFSIVVFLRIGFVVGHAGLLQALAMLLVAYFILALTVLSVCAIATNGAVQGGGAYFMISRTLGPEVGGSIGLMFYLANVCGCAVSLLGLVESVLDVFGADATGPSGLRVLPQGYGWNLLYGSLLLGLVGGVCTLGAGLYARASFLTFLLVSGSLASVLISFVAVGPRDIRLTPRPGPNGSSLPPRFGHFTGFNSSTLKDNLGAGYAEDYTTGAVMNFASVFAVLFNGCTGIMAGANMSGELKDPSRAIPLGTIVAVAYTFFVYVLLFFLSSFTCDRTLLQEDYGFFRAISLWPPLVLIGIYATALSASMSSLIGASRILHALARDDLFGVILAPAKVVSRGGNPWAAVLYSWGLVQLVLLAGKLNTLAAVVTVFYLVAYAAVDLSCLSLEWASAPNFRPTFSLFSWHTCLLGVASCLLMMFLISPGAAGGSLLLMGLLAALLTARGGPSSWGYVSQALLFHQVRKYLLRLDVRKDHVKFWRPQLLLLVGNPRGALPLLRLANQLKKGGLYVLGHVTLGDLDSLPSDPVQPQYGAWLSLVDRAQVKAFVDLTLSPSVRQGAQHLLRISGLGGMKPNTLVLGFYDDAPPQDHFLTDPAFSEPADSTREGSSPALSTLFPPPRAPGSPRALNPQDYVATVADALKMNKNVVLARASGALPPERLSRGSGGTSQLHHVDVWPLNLLRPRGGPGYVDVCGLFLLQMATILGMVPAWHSARLRIFLCLGPREAPGAAEGRLRALLSQLRIRAEVQEVVWGEGAGAGEPEAEEEGDFVNSGRGDAEAEALARSANALVRAQQGRGTGGGPGGPEGGDAEGPITALTFLYLPRPPADPARYPRYLALLETLTRDLGPTLLVHGVTPVTCTDL

SEQ ID NO: 3710 - protein, 1338 aa, Homo sapiens
MASPPRHGPPGPASGDGPNLNNNNNNNNHSVRKCGYLRKQKHGHKRFFVLRGPGAGGDEATAGGGSAPQPPRLEYYESEKKWRSKAGAPKRVIALDCCLNINKRADAKHKYLIALYTKDEYFAVAAENEQEQEGWYRALTDLVSEGRAAAGDAPPAAAPAASCSASLPGALGGSAGAAGAEDSYGLVAPATAAYREVWQVNLKPKGLGQSKNLTGVYRLCLSARTIGFVKLNCEQPSVTLQLMNIRRCGHSDSFFFIEVGRSAVTGPGELWMQADDSVVAQNIHETILEAMKALKELFEFRPRSKSQSSGSSATHPISVPGARRHHHLVNLPPSQTGLVRRSRTDSLAATPPAAKCSSCRVRTASEGDGGAAAGAAAAGARPVSVAGSPLSPGPVRAPLSRSHTLSGGCGGRGSKVALLPAGGALQHSRSMSMPVAHSPPAATSPGSLSSSSGHGSGSYPPPPGPHPPLPHPLHHGPGQRPSSGSASASGSPSDPGFMSLDEYGSSPGDLRAFCSHRSNTPESIAETPPARDGGGGGEFYGYMTMDRPLSHCGRSYRRVSGDAAQDLDRGLRKRTYSLTTPARQRPVPQPSSASLDEYTLMRATFSGSAGRLCPSCPASSPKVAYHPYPEDYGDIEIGSHRSSSSNLGADDGYMPMTPGAALAGSGSGSCRSDDYMPMSPASVSAPKQILQPRAAAAAAAAVPSAGPAGPAPTSAAGRTFPASGGGYKASSPAESSPEDSGYMRMWCGSKLSMEHADGKLLPNGDYLNVSPSDAVTTGTPPDFFSAALHPGGEPLRGVPGCCYSSLPRSYKAPYTCGGDSDQYVLMSSPVGRILEEERLEPQATPGPSQAASAFGAGPTQPPHPVVPSPVRPSGGRPEGFLGQRGRAVRPTRLSLEGLPSLPSMHEYPLPPEPKSPGEYINIDFGEPGARLSPPAPPLLASAASSSSLLSASSPASSLGSGTPGTSSDSRQRSPLSDYMNLDFSSPKSPKPGAPSGHPVGSLDGLLSPEASSPYPPLPPRPSASPSSSLQPPPPPPAPGELYRLPPASAVATAQGPGAASSLSSDTGDNGDYTEMAFGVAATPPQPIAAPPKPEAARVASPTSGVKRLSLMEQVSGVEAFLQASQPPDPHRGAKVIRADPQGGRRRHSSETFSSTTTVTPVSPSFAHNPKRHNSASVENVSLRKSSEGGVGVGPGGGDEPPTSPRQLQPAPPLAPQGRPWTPGQPGGLVGCPGSGGSPMRRETSAGFQNGLNYIAIDVREEPGLPPQPQPPPPPLPQPGDKSSWGRTRSLGGLISAVGVGSTGGGCGGPGPGALPPANTYASIDFLSHHLKEATIVKE

SEQ ID NO: 3711 - protein, 428 aa, Homo sapiens
MKVEKDHLAKPFFPAIYKEFEELHKLVKKMCQDYLSSSGLCSQETLEINNDKVAESLGITEFLRKKEIHPDNLGPKHLSRDMDGEQLEGASSEKREREAAEEGLASVKRPRREALSNDTTESLAANSRGREKPRPLHALAAGEGFSPPVNVTVSPRSEESHTTTVSGGNGSVFQAGPQLQALANLEARRGSIGAALSSRDVSGLPVYAQSGEPRRLTQAQVAAFPGENALEHSSDQDTWDSLRSPGFCSPLSSGGGAESLPPGGPGHAEAGHLGKVCDFHLNHQQPSPTSVLPTEVAAPPLEKILSVDSVAVDCAYRTVPKPGPQPGPHGSLLTEGCLRSLSGDLNRFPCGMEVHSGQRELESVVAVGEAMAFEISNGSHELLSQGQKQIFIQTSDGLILSPPGTIVSQEEDIVTVTDAEGRACGWAR

SEQ ID NO: 3712 - protein, 458 aa, Homo sapiens
MAAPRAGRGAGWSLRAWRALGGIRWGRRPRLTPDLRALLTSGTSDPRARVTYGTPSLWARLSVGVTEPRACLTSGTPGPRAQLTAVTPDTRTREASENSGTRSRAWLAVALGAGGAVLLLLWGGGRGPPAVLAAVPSPPPASPRSQYNFIADVVEKTAPAVVYIEILDRHPFLGREVPISNGSGFVVAADGLIVTNAHVVADRRRVRVRLLSGDTYEAVVTAVDPVADIATLRIQTKEPLPTLPLGRSADVRQGEFVVAMGSPFALQNTITSGIVSSAQRPARDLGLPQTNVEYIQTDAAIDFGNSGGPLVNLDGEVIGVNTMKVTAGISFAIPSDRLREFLHRGEKKNSSSGISGSQRRYIGVMMLTLSPSILAELQLREPSFPDVQHGVLIHKVILGSPAHRAGLRPGDVILAIGEQMVQNAEDVYEAVRTQSQLAVQIRRGRETLTLYVTPEVTE

SEQ ID NO: 3713 - protein, 361 aa, Homo sapiens
MAAPRAGRGAGWSLRAWRALGGIRWGRRPRLTPDLRALLTSGTSDPRARVTYGTPSLWARLSVGVTEPRACLTSGTPGPRAQLTAVTPDTRTREASENSGTRSRAWLAVALGAGGAVLLLLWGGGRGPPAVLAAVPSPPPASPRSQYNFIADVVEKTAPAVVYIEILDRHPFLGREVPISNGSGFVVAADGLIVTNAHVVADRRRVRVRLLSGDTYEAVVTAVDPVADIATLRIQTKFGNSGGPLVNLDGEVIGVNTMKVTAGISFAIPSDRLREFLHRGEKKNSSSGISGSQRRYIGVMMLTLSPRAGLRPGDVILAIGEQMVQNAEDVYEAVRTQSQLAVQIRRGRETLTLYVTPEVTE

SEQ ID NO: 3714 - protein, 702 aa, Homo sapiens
MAAPMTPAARPEDYEAALNAALADVPELARLLEIDPYLKPYAVDFQRRYKQFSQILKNIGENEGGIDKFSRGYESFGVHRCADGGLYSKEWAPGAEGVFLTGDFNGWNPFSYPYKKLDYGKWELYIPPKQNKSVLVPHGSKLKVVITSKSGEILYRISPWAKYVVREGDNVNYDWIHWDPEHSYEFKHSRPKKPRSLRIYESHVGISSHEGKVASYKHFTCNVLPRIKGLGYNCIQLMAIMEHAYYASFGYQITSFFAASSRYGTPEELQELVDTAHSMGIIVLLDVVHSHASKNSADGLNMFDGTDSCYFHSGPRGTHDLWDSRLFAYSSWEVLRFLLSNIRWWLEEYRFDGFRFDGVTSMLYHHHGVGQGFSGDYSEYFGLQVDEDALTYLMLANHLVHTLCPDSITIAEDVSGMPALCSPISQGGGGFDYRLAMAIPDKWIQLLKEFKDEDWNMGDIVYTLTNRRYLEKCIAYAESHDQALVGDKSLAFWLMDAEMYTNMSVLTPFTPVIDRGIQLHKMIRLITHGLGGEGYLNFMGNEFGHPEWLDFPRKGNNESYHYARRQFHLTDDDLLRYKFLNNFDRDMNRLEERYGWLAAPQAYVSEKHEGNKIIAFERAGLLFIFNFHPSKSYTDYRVGTALPGKFKIVLDSDAAEYGGHQRLDHSTDFFSEAFEHNGRPYSLLVYIPSRVALILQNVDLPN

SEQ ID NO: 3715 - protein, 193 aa, Homo sapiens
MVAPKSHTDDWAPGPFSSKPQRSQLQIFSSVLQTSLLFLLMGLRASGKDSAPTVVSGILGGSVTLPLNISVDTEIENVIWIGPKNALAFARPKENVTIMVKSYLGRLDITKWSYSLCISNLTLNDAGSYKAQINQRNFEVTTEEEFTLFVYAPFIEKLSVHVIEGDHRTLLEGSGLESIISTLAEPRVSVREG

SEQ ID NO: 3716 - protein, 655 aa, Homo sapiens
MVAPKSHTDDWAPGPFSSKPQRSQLQIFSSVLQTSLLFLLMGLRASGKDSAPTVVSGILGGSVTLPLNISVDTEIENVIWIGPKNALAFARPKENVTIMVKSYLGRLDITKWSYSLCISNLTLNDAGSYKAQINQRNFEVTTEEEFTLFVYEQLQEPQVTMKSVKVSENFSCNITLMCSVKGAEKSVLYSWTPREPHASESNGGSILTVSRTPCDPDLPYICTAQNPVSQRSSLPVHVGQFCTDPGASRGGTTGETVVGVLGEPVTLPLALPACRDTEKVVWLFNTSIISKEREEAATADPLIKSRDPYKNRVWVSSQDCSLKISQLKIEDAGPYHAYVCSEASSVTSMTHVTLLIYRRLRKPKITWSLRHSEDGICRISLTCSVEDGGNTVMYTWTPLQKEAVVSQGESHLNVSWRSSENHPNLTCTASNPVSRSSHQFLSENICSGPERNTKLWIGLFLMVCLLCVGIFSWCIWKRKGRCSVPAFCSSQAEAPADTPEPTAGHTLYSVLSQGYEKLDTPLRPARQQPTPTSDSSSDSNLTTEEDEDRPEVHKPISGRYEVFDQVTQEGAGHDPAPEGQADYDPVTPYVTEVESVVGENTMYAQVFNLQGKTPVSQKEESSATIYCSIRKPQVVPPPQQNDLEIPESPTYENFT

SEQ ID NO: 3717 - protein, 269 aa, Homo sapiens
MQEIIASVDHIKFDLEIAVEQQLGAQPLPFPGMDKSGAAVCEFFLKAACGKGGMCPFRHISGEKTVVCKHWLRGLCKKGDQCEFLHEYDMTKMPECYFYSKFGECSNKECPFLHIDPESKIKDCPWYDRGFCKHGPLCRHRHTRRVICVNYLVGFCPEGPSCKFMHPRFELPMGTTEQPPLPQQTQPPAKQSNNPPLQRSSSLIQLTSQNSSPNQQRTPQVIGVMQSQNSSAGNRGPRPLEQVTCYKCGEKGHYANRCTKGHLAFLSGQ

SEQ ID NO: 3718 - protein, 517 aa, Homo sapiens
MAAQLLEEKLTCAICLGLYQDPVTLPCGHNFCGACIRDWWDRCGKACPECREPFPDGAELRRNVALSGVLEVVRAGPARDPGPDPGPGPDPAARCPRHGRPLELFCRTEGRCVCSVCTVRECRLHERALLDAERLKREAQLRASLEVTQQQATQAEGQLLELRKQSSQIQNSACILASWVSGKFSSLLQALEIQHTTALRSIEVAKTQALAQARDEEQRLRVHLEAVARHGCRIRELLEQVDEQTFLQESQLLQPPGPLGPLTPLQWDEDQQLGDLKQLLSRLCGLLLEEGSHPGAPAKPVDLAPVEAPGPLAPVPSTVCPLRRKLWQNYRNLTFDPVSANRHFYLSRQDQQVKHCRQSRGPGGPGSFELWQVQCAQSFQAGHHYWEVRASDHSVTLGVSYPQLPRCRLGPHTDNIGRGPCSWGLCVQEDSLQAWHNGEAQRLPGVSGRLLGMDLDLASGCLTFYSLEPQTQPLYTFHALFNQPLTPVFWLLEGRTLTLCHQPGAVFPLGPQEEVLS

SEQ ID NO: 3719 - protein, 207 aa, Homo sapiens
MQSGTHWRVLGLCLLSVGVWGQDGNEEMGGITQTPYKVSISGTTVILTCPQYPGSEILWQHNDKNIGGDEDDKNIGSDEDHLSLKEFSELEQSGYYVCYPRGSKPEDANFYLYLRARVCENCMEMDVMSVATIVIVDICITGGLLLLVYYWSKNRKAKAKPVTRGAGAGGRQRGQNKERPPPVPNPDYEPIRKGQRDLYSGLNQRRI

SEQ ID NO: 3720 - protein, 251 aa, Homo sapiens
MELSAIGEQVFAVESIRKKRVRKGKVEYLVKWKGWPPKYSTWEPEEHILDPRLVMAYEEKEERDRASGYRKRGPKPKRLLLQRLYSMDLRSSHKAKGKEKLCFSLTCPLGSGSPEGVVKAGAPELVDKGPLVPTLPFPLRKPRKAHKYLRLSRKKFPPRGPNLESHSHRRELFLQEPPAPDVLQAAGEWEPAAQPPEEEADADLAEGPPPWTPALPSSEVTVTDITANSITVTFREAQAAEGFFRDRSGKF

SEQ ID NO: 3721 - protein, 120 aa, Homo sapiens
MVAMRCLGASPTPGEVQRHLQTHGIDGNGELDFSTFLTIMHMQIKQEDPKKEILLAMLMVDKEKKGYVMASDLRSKLTSLGEKLTHKEVDDLFREADIEPNGKVKYDEFIHKITLPGRDY

SEQ ID NO: 3722 - protein, 59 aa, Homo sapiens
MAAEHLLPGPPPSLADFRLEAGGKGTERGSGSSKPTGSSRGPRMWMISSGKQISNPMAK

SEQ ID NO: 3723 - protein, 484 aa, Homo sapiens
MGSAFERVVRRVVQELDHGGEFIPVTSLQSSTGFQPYCLVVRKPSSSWFWKPRYKCVNLSIKDILEPDAAEPDVQRGRSFHFYDAMDGQIQGSVELAAPGQAKIAGGAAVSDSSSTSMNVYSLSVDPNTWQTLLHERHLRQPEHKVLQQLRSRGDNVYVVTEVLQTQKEVEVTRTHKREGSGRFSLPGATCLQGEGQGHLSQKKTVTIPSGSTLAFRVAQLVIDSDLDVLLFPDKKQRTFQPPATGHKRSTSEGAWPQLPSGLSMMRCLHNFLTDGVPAEGAFTEDFQGLRAEVETISKELELLDRELCQLLLEGLEGVLRDQLALRALEEALEQGQSLGPVEPLDGPAGAVLECLVLSSGMLVPELAIPVVYLLGALTMLSETQHKLLAEALESQTLLGPLELVGSLLEQSAPWQERSTMSLPPGLLGNSWGEGAPAWVLLDECGLELGEDTPHVCWEPQAQGRMCALYASLALLSGLSQEPH

SEQ ID NO: 3724 - protein, 326 aa, Homo sapiens
MAEASPHPGRYFCHCCSVEIVPRLPDYICPRCESGFIEELPEETRSTENGSAPSTAPTDQSRPPLEHVDQHLFTLPQGYGQFAFGIFDDSFEIPTFPPGAQADDGRDPESRRERDHPSRHRYGARQPRARLTTRRATGRHEGVPTLEGIIQQLVNGIITPATIPSLGPWGVLHSNPMDYAWGANGLDAIITQLLNQFENTGPPPADKEKIQALPTVPVTEEHVGSGLECPVCKDDYALGERVRQLPCNHLFHDGCIVPWLEQHDSCPVCRKSLTGQNTATNPPGLTGVSFSSSSSSSSSSSPSNENATWSPLGRPQPPRPLSNLTL

SEQ ID NO: 3725 - protein, 311 aa, Homo sapiens
MAEASPHPGRYFCHCCSVEIVPRLPDYICPRCESGFIEELPEETRSTENGSAPSTAPTDQSRPPLEHVDQHLFTLPQGYGQFAFGIFDDSFEIPTFPPGAQADDGRDPESRRERDHPSRHRYGARQPRARLTTRRATGRHEGVPTLEGIIQQLVNGIITPATIPSLGPWGVLHSNPMDYAWGANGLDAIITQLLNQFENTGPPPADKEKIQALPTVPVTEEHVGSGLECPVCKDDYALGERVRQLPCNHLFHDGCIVPWLEQHDSCPVCRKSLTGQNTATNPPGLTGVSFSSSSSSSSSSSPSNENATSNS

SEQ ID NO: 3726 - protein, 72 aa, Homo sapiens
MMEEISIMVAYDAHVFSQLHDEDFLTSLVAISKPRSMVPTKKLKKYEKEYQTMRESQLQQEDPMDRYKFVYL

SEQ ID NO: 3727 - protein, 815 aa, Homo sapiens
MEVRASLQKVSGSSDSVATMNSEEFVLVPQYADDNSTKHEEKPQLKIVSNGDEQLEKAMEEILRDSEKRPSSLLVDCQSSSEISDHSFGDIPASQTNKPSLQLILDPSNTEISTPRPSSPGGLPEEDSVLFNKLTYLGCMKVSSPRNEVEALRAMATMKSSSQYPFPVTLYVPNVPEGSVRIIDQSSNVEIASFPIYKVLFCARGHDGTTESNCFAFTESSHGSEEFQIHVFSCEIKEAVSRILYSFCTAFKRSSRQVSDVKDSVIPTPDSDVFTFSVSLEVKEDDGKGNFSPVPKDRDKFYFKLKQGIEKKVVITVQQLSNKELAIERCFGMLLSPGRNVKNSDMHLLDMESMGKSYDGRAYVITGMWNPNAPVFLALNEETPKDKQVYMTVAVDMVVTEVVEPVRFLLETVVRVYPANERFWYFSRKTFTETFFMRLKQSEGKGHTNAGDAIYEVVSLQRESDKEEPVTPTSGGGPMSPQDDEAEEESDNELSSGTGDVSKDCPEKILYSWGELLGKWHSNLGARPKGLSTLVKSGVPEALRAEVWQLLAGCHDNQAMLDRYRILITKDSAQESVITRDIHRTFPAHDYFKDTGGDGQESLYKICKAYSVYDEDIGYCQGQSFLAAVLLLHMPEEQAFCVLVKIMYDYGLRDLYRNNFEDLHCKFYQLERLMQEQLPDLHSHFSDLNLEAHMYASQWFLTLFTAKFPLCMVFHIIDLLLCEGLNIIFHVALALLKTSKEDLLQADFEGALKFFRVQLPKRYRAEENARRLMEQACNIKVPTKKLKKYEKEYQTMRESQLQQEDPMDRYKFVYL

SEQ ID NO: 3728 - protein, 65 aa, Homo sapiens [sequence omitted]

SEQ ID NO: 3729 - protein, 54 aa, Homo sapiens
MFLSAVFFAKSKSNETKSPLRGKEKNTLPLNGGLKMTLIYKEKTEGGDTDSEIL

SEQ ID NO: 3730 - protein, 563 aa, Homo sapiens
MMTAESREATGLSPQAAQEKDGIVIVKVEEEDEEDHMWGQDSTLQDTPPPDPEIFRQRFRRFCYQNTFGPREALSRLKELCHQWLRPEINTKEQILELLVLEQFLSILPKELQVWLQEYRPDSGEEAVTLLEDLELDLSGQQVPGQVHGPEMLARGMVPLDPVQESSSFDLHHEATQSHFKHSSRKPRLLQSRALPAAHIPAPPHEGSPRDQAMASALFTADSQAMVKIEDMAVSLILEEWGCQNLARRNLSRDNRQENYGSAFPQGGENRNENEESTSKAETSEDSASRGETTGRSQKEFGEKRDQEGKTGERQQKNPEEKTRKEKRDSGPAIGKDKKTITGERGPREKGKGLGRSFSLSSNFTTPEEVPTGTKSHRCDECGKCFTRSSSLIRHKIIHTGEKPYECSECGKAFSLNSNLVLHQRIHTGEKPHECNECGKAFSHSSNLILHQRIHSGEKPYECNECGKAFSQSSDLTKHQRIHTGEKPYECSECGKAFNRNSYLILHRRIHTREKPYKCTKCGKAFTRSSTLTLHHRIHARERASEYSPASLDAFGAFLKSCV

SEQ ID NO: 3731 - protein, 942 aa, Homo sapiens
MKRRAGLGGSMRSVVGFLSQRGLHGDPLLTQDFQRRRLRGCRNLYKKDLLGHFGCVNAIEFSNNGGQWLVSGGDDRRVLLWHMEQAIHSRVKPIQLKGEHHSNIFCLAFNSGNTKVFSGGNDEQVILHDVESSETLDVFAHEDAVYGLSVSPVNDNIFASSSDDGRVLIWDIRESPHGEPFCLANYPSAFHSVMFNPVEPRLLATANSKEGVGLWDIRKPQSSLLRYGGNLSLQSAMSVRFNSNGTQLLALRRRLPPVLYDIHSRLPVFQFDNQGYFNSCTMKSCCFAGDRDQYILSGSDDFNLYMWRIPADPEAGGIGRVVNGAFMVLKGHRSIVNQVRFNPHTYMICSSGVEKIIKIWSPYKQPGCTGDLDGRIEDDSRCLYTHEEYISLVLNSGSGLSHDYANQSVQEDPRMMAFFDSLVRREIEGWSSDSDSDLSESTILQLHAGVSERSGYTDSESSASLPRSPPPTVDESADNAFHLGPLRVTTTNTVASTPPTPTCEDAASRQQRLSALRRYQDKRLLALSNESDSEENVCEVELDTDLFPRPRSPSPEDESSSSSSSSSSEDEEELNERRASTWQRNAMRRRQKTTREDKPSAPIKPTNTYIGEDNYDYPQIKVDDLSSSPTSSPERSTSTLEIQPSRASPTSDIESVERKIYKAYKWLRYSYISYSNNKDGETSLVTGEADEGRAGTSHKDNPAPSSSKEACLNIAMAQRNQDLPPEGCSKDTFKEETPRTPSNGPGHEHSSHAWAEVPEGTSQDTGNSGSVEHPFETKKLNGKALSSRAEEPPSPPVPKASGSTLNSGSGNCPRTQSDDSEERSLETICANHNNGRLHPRPPHPHNNGQNLGELEVVAYSSPGHSDTDRDNSSLTGTLLHKDCCGSEMACETPNAGTREDPTDTPATDSSRAVHGHSGLKRQRIELEDTDSENSSSEKKLKT

SEQ ID NO: 3732 - protein, 801 aa, Homo sapiens
MLQNVTPHNKLPGEGNAGLLGLGPEAAAPGKRIRKPSLLYEGFESPTMASVPALQLTPANPPPPEVSNPKKPGRVTNQLQYLHKVVMKALWKHQFAWPFRQPVDAVKLGLPDYHKIIKQPMDMGTIKRRLENNYYWAASECMQDFNTMFTNCYIYNKPTDDIVLMAQTLEKIFLQKVASMPQEEQELVVTIPKNSHKKGAKLAALQGSVTSAHQVPAVSSVSHTALYTPPPEIPTTVLNIPHPSVISSPLLKSLHSAGPPLLAVTAAPPAQPLAKKKGVKRKADTTTPTPTAILAPGSPASPPGSLEPKAARLPPMRRESGRPIKPPRKDLPDSQQQHQSSKKGKLSEQLKHCNGILKELLSKKHAAYAWPFYKPVDASALGLHDYHDIIKHPMDLSTVKRKMENRDYRDAQEFAADVRLMFSNCYKYNPPDHDVVAMARKLQDVFEFRYAKMPDEPLEPGPLPVSTAMPPGLAKSSSESSSEESSSESSSEEEEEEDEEDEEEEESESSDSEEERAHRLAELQEQLRAVHEQLAALSQGPISKPKRKREKKEKKKKRKAEKHRGRAGADEDDKGPRAPRPPQPKKSKKASGSGGGSAALGPSGFGPSGGSGTKLPKKATKTAPPALPTGYDSEEEEESRPMSYDEKRQLSLDINKLPGEKLGRVVHIIQAREPSLRDSNPEEIEIDFETLKPSTLRELERYVLSCLRKKPRKPYTIKKPVGKTKEELALEKKRELEKRLQDVSGQLNSTKKPPKKANEKTESSSAQQVAVSRLSASSSSSDSSSSSSSSSSSDTSDSDSG

SEQ ID NO: 3733 - protein, 247 aa, Homo sapiens
MRLRNQLQSVYKMDPLRNEEEVRVKIKDLNEHIVCCLCAGYFVDATTITECLHTFCKSCIVKYLQTSKYCPMCNIKIHETQPLLNLKLDRVMQDIVYKLVPGLQDSEEKRIREFYQSRGLDRVTQPTGEEPALSNLGLPFSSFDHSKAHYYRYDEQLNLCLERLSSGKDKNKSVLQNKYVRCSVRAEVRHLRRVLCHRLMLNPQHVQLLFDNEVLPDHMTMKQIWLSRWFGKPSPLLLQYSVKEKRR

SEQ ID NO: 3734 - protein, 80 aa, Homo sapiens
MFPLVKSALNRLQVRSIQQTMARQSHQKRTPDFHDKYGNAVLASGATFCIVTWTYVATQVGIEWNLSPVGRVTPKEWRNQ

SEQ ID NO: 3735 - protein, 712 aa, Homo sapiens
MAAAGLVAVAAAAEYSGTVASGGNLPGVHCGPSSGAGPGFGPGSWSRSLDRALEEAAVTGVLSLSGRKLREFPRGAANHDLTDTTRADLSRNRLSEIPIEACHFVSLENLNLYQNCIRYIPEAILNLQALTFLNISRNQLSTLPVHLCNLPLKVLIASNNKLVSLPEEIGHLRHLMELDVSCNEIQTIPSQIGNLEALRDLNVRRNHLVHLPEELAELPLIRLDFSCNKITTIPVCYRNLRHLQTITLDNNPLQSPPAQICIKGKVHIFKYLNIQACKIAPDLPDYDRRPLGFGSCHEELYSSRPYGALDSGFNSVDSGDKRWSGNEPTDEFSDLPLRVAEITKEQRLRRESQYQENRGSLVVTNGGVEHDLDQIDYIDSCTAEEEEAEVRQPKGPDPDSLSSQFMAYIEQRRISHEGSPVKPVAIREFQKTEDMRRYLHQNRVPAEPSSLLSLSASHNQLSHTDLELHQRREQLVERTRREAQLAALQYEEEKIRTKQIQRDAVLDFVKQKASQSPQKQHPLLDGVDGECPFPSRRSQHTDDSALCMSLSGLNQVGCAATLPHSSAFTPLKSDDRPNALLSSPATETVHHSPAYSFPAAIQRNQPQRPESFLFRAGVRAETNKGHASPLPPSAAPTTDSTDSITGQNSRQREEELELIDQLRKHIEYRLKVSLPCDLGAALTDGVVLCHLANHVRPRSVPSIHVPSPAVVS

SEQ ID NO: 3736 - protein, 659 aa, Homo sapiens
MVDYKKRAERRREYYEKIKKDPAQFLQVHGRACKVHLDSAVALAAESPVNMMPWQGDTNNMIDRFDVRAHLDHIPDYTPPLLTTISPEQESDERKCNYERYRGLVQNDFAGISEEQCLYQIYIDELYGGLQRPSEDEKKKLAEKKASIGYTYEDSTVAEVEKAAEKPEEEESAAEEESNSDEDEVIPDIDVEVDVDELNQEQVADLNKQATTYGMADGDFVRMLRKDKEEAEAIKHAKALEEEKAMYSGRRSRRQRREFREKRLRGRKISPPSYARRDSPTYDPYKRSPSESSSESRSRSRSPTPGREEKITFITSFGGSDEEAAAAAAAAAASGVTTGKPPAPPQPGGPAPGRNASARRRSSSSSSSSSASRTSSSRSSSRSSSRSRRGGGYYRSGRHARSRSRSWSRSRSRSRRYSRSRSRGRRHSGGGSRDGHRYSRSPARRGGYGPRRRSRSRSHSGDRYRRGGRGLRHHSSSRSRSSWSLSPSRSRSLTRSRSHSPSPSQSRSRSRSRSQSPSPSPAREKLTRPAASPAVGEKLKKTEPAAGKETGAAKPKLTPQEKLKLRMQKALNRQFKADKKAAQEKMIQQEHERQEREDELRAMARKIRMKERERREKEREEWERQYSRQSRSPSPRYSREYSSSRRRSRSRSRSPHYRH

SEQ ID NO: 3737 - protein, 218 aa, Homo sapiens
MDNAEAQFTTALRLTNHQELWAFIVTNLASVYIREGNRHQELYSLLERINPDHSFPVSSHCLRAAAFYVRGLFSFFQGRYNEAKRFLRETLKMSNAEDLNRLTACSLVLLGHIFYVLGNHRESNNMVVPAMQLASKIPDMSVQLWSSALLRDLNKACGNAMDAHEAAQMHQNFSQQLLQDHIEACSLPEHNLITWTDGPPPVQFQAQNGPNTSLASLL

SEQ ID NO: 3738 - protein, 279 aa, Homo sapiens
MPAFIQMGRDKNFSSLHTVFCATGGGAYKFEQDFLTIGDLQLCKLDELDCLIKGILYIDSVGFNGRSQCYYFENPADSEKCQKLPFDLKNPYPLLLVNIGSGVSILAVYSKDNYKRVTGTSLGGGTFFGLCCLLTGCTTFEEALEMASRGDSTKVDKLVRDIYGGDYERFGLPGWAVASSFGNMMSKEKREAVSKEDLARATLITITNNIGSIARMCALNENINQVVFVGNFLRINTIAMRLLAYALDYWSKGQLKALFSEHEGYFGAVGALLELLKIP

SEQ ID NO: 3739 - protein, 570 aa, Homo sapiens
MRRLGPFHPRVHWAAPPSLSSGLHRLLFLRGTRIPSSTTLSPPRHDSLSLDGGTVNPPRVREPTGREAFGPSPASSDWLPARWRNGRGGRPRARLCSGWTAAEEARRNPTLGGLLGRQRLLLRMGGGRLGAPMERHGRASATSVSSAGEQAAGDPEGRRQEPLRRRASSASVPAVGASAEGTRRDRLGSYSGPTSVSRQRVESLRKKRPLFPWFGLDIGGTLVKLVYFEPKDITAEEEEEEVESLKSIRKYLTSNVAYGSTGIRDVHLELKDLTLCGRKGNLHFIRFPTHDMPAFIQMGRDKNFSSLHTVFCATGGGAYKFEQDFLTIGDLQLCKLDELDCLIKGILYIDSVGFNGRSQCYYFENPADSEKCQKLPFDLKNPYPLLLVNIGSGVSILAVYSKDNYKRVTGTSLGGGTFFGLCCLLTGCTTFEEALEMASRGDSTKVDKLVRDIYGGDYERFGLPGWAVASSFGNMMSKEKREAVSKEDLARATLITITNNIGSIARMCALNENINQVVFVGNFLRINTIAMRLLAYALDYWSKGQLKALFSEHEGYFGAVGALLELLKIP

SEQ ID NO: 3740 - protein, 279 aa, Homo sapiens; identical to SEQ ID NO: 3738

SEQ ID NO: 3741 - protein, 112 aa, Homo sapiens
MDGEEKTYGGCEGPDAMYVKLISSDGHEFIVKREHALTSGTIKAMLSGPGQFAENETNEVNFREIPSHVLSKVCMYFTYKVRYTNSSTEIPEFPIAPEIALELLMAANFLDC

SEQ ID NO: 3742 - protein, 820 aa, Homo sapiens
MSGTKPDILWAPHHVDRFVVCDSELSLYHVESTVNSELKAGSLRLSEDSAATLLSINSDTPYMKCVAWYLNYDPECLLAVGQANGRVVLTSLGQDHNSKFKDLIGKEFVPKHARQCNTLAWNPLDSNWLAASLDKHRADFSVLIWDICSKYTPDIVPMEKVKLSAGETETTLLVTKPLYELGQNDACLSLCWLPRDQKLLLAGMHRNLAIFDLRNTSQKMFVNTKAVQGVTVDPYFHDRVASFYEGQVAIWDLRKFEKPVLTLTEQPKPLTKVAWCPTRTGLLATLTRDSNIIRLYDMQHTPTPIGDETEPTIIERSVQPCDNYIASFAWHPTSQNRMIVVTPNRTMSDFTVFERISLAWSPITSLMWACGRHLYECTEEENDNSLEKDIATKMRLRALSRYGLDTEQVWRNHILAGNEDPQLKSLWYTLHFMKQYTEDMDQKSPGNKGSLVYAGIKSIVKSSLGMVESSRHNWSGLDKQSDIQNLNEERILALQLCGWIKKGTDVDVGPFLNSLVQEGEWERAAAVALFNLDIRRAIQILNEGASSEKGDLNLNVVAMALSGYTDEKNSLWREMCSTLRLQLNNPYLCVMFAFLTSETGSYDGVLYENKVAVRDRVAFACKFLSDTQLNRYIEKLTNEMKEAGNLEGILLTGLTKDGVDLMESYVDRTGDVQTASYCMLQGSPLDVLKDERVQYWIENYRNLLDAWRFWHKRAEFDIHRSKLDPSSKPLAQVFVSCNFCGKSISYSCSAVPHQGRGFSQYGVSGSPTKSKVTSCPGCRKPLPRCALYLINMGTPVSSCPGGTKSDEKVDLSKDKKISPI

SEQ ID NO: 3743 - protein, 4646 aa, Homo sapiens [sequence omitted]

SEQ ID NO: 3744 - protein, 355 aa, Homo sapiens
MGCTVSAEDKAAAERSKMIDKNLREDGEKAAREVKLLLLGAGESGKSTIVKQMKIIHEDGYSEEECRQYRAVVYSNTIQSIMAIVKAMGNLQIDFADPSRADDARQLFALSCTAEEQGVLPDDLSGVIRRLWADHGVQACFGRSREYQLNDSAAYYLNDLERIAQSDYIPTQQDVLRTRVKTTGIVETHFTFKDLHFKMFDVGGQRSERKKWIHCFEGVTAIIFCVALSAYDLVLAEDEEMNRMHESMKLFDSICNNKWFTDTSIILFLNKKDLFEEKITHSPLTICFPEYTGANKYDEAASYIQSKFEDLNKRKDTKEIYTHFTCATDTKNVQFVFDAVTDVIIKNNLKDCGLF

SEQ ID NO: 3745 - protein, 453 aa, Homo sapiens
MDWKEVLRRRLATPNTCPNKKKSEQELKDEEMDLFTKYYSEWKGGRKNTNEFYKTIPRFYYRLPAEDEVLLQKLREESRAVFLQRKSRELLDNEELQNLWFLLDKHQTPPMIGEEAMINYENFLKVGEKAGAKCKQFFTAKVFAKLLHTDSYGRISIMQFFNYVMRKVWLHQTRIGLSLYDVAGQGYLRESDLENYILELIPTLPQLDGLEKSFYSFYVCTAVRKFFFFLDPLRTGKIKIQDILACSFLDDLLELRDEELSKESQETNWFSAPSALRVYGQYLNLDKDHNGMLSKEELSRYGTATMTNVFLDRVFQECLTYDGEMDYKTYLDFVLALENRKEPAALQYIFKLLDIENKGYLNVFSLNYFFRAIQELMKIHGQDPVSFQDVKDEIFDMVKPKDPLKISLQDLINSNQGDTVTTILIDLNGFWTYENREALVANDSENSADLDDT

SEQ ID NO: 3746 - protein, 214 aa, Homo sapiens
MGEEVIPLRVLSKSEWMDLKKEYLALQKASMASLKKTISQIKSESEMETDSGVPQNTGMKNEKTANREECRTQEKVNATGPQFVSGVIVKIISTEPLPGRKQVRDTLAAISEVLYVDLLEGDTECHARFKTPEDAQAVINAYTEINKEHCWKLEILSGDHEQRYWQKILVDRQAKLNQPREKKRGTEKLITKAEKIRLAKTQQASKHIRFSEYD

SEQ ID NO: 3747 - protein, 543 aa, Homo sapiens
MGTSLSPNDPWPLNPLSIQQTTLLLLLSVLATVHVGQRLLRQRRRQLRSAPPGPFAWPLIGNAAAVGQAAHLSFARLARRYGDVFQIRLGSCPIVVLNGERAIHQALVQQGSAFADRPAFASFRVVSGGRSMAFGHYSEHWKVQRRAAHSMMRNFFTRQPRSRQVLEGHVLSEARELVALLVRGSADGAFLDPRPLTVVAVANVMSAVCFGCRYSHDDPEFRELLSHNEEFGRTVGAGSLVDVMPWLQYFPNPVRTVFREFEQLNRNFSNFILDKFLRHCESLRPGAAPRDMMDAFILSAEKKAAGDSHGGGARLDLENVPATITDIFGASQDTLSTALQWLLLLFTRYPDVQTRVQAELDQVVGRDRLPCMGDQPNLPYVLAFLYEAMRFSSFVPVTIPHATTANTSVLGYHIPKDTVVFVNQWSVNHDPVKWPNPENFDPARFLDKDGLINKDLTSRVMIFSVGKRRCIGEELSKMQLFLFISILAHQCDFRANPNEPAKMNFSYGLTIKPKSFKVNVTLRESMELLDSAVQNLQAKETCQ

SEQ ID NO: 3748 - protein, 241 aa, Homo sapiens
MLRDTMKSWNDSQSDLCSTDQEEEEEMIFGENEDDLDEMMDLSDLPTSLFACSVHEAVFEAREQKERFEALFTIYDDQVTFQLFKSFRRVRINFSKPEAAARARIELHETDFNGQKLKLYFAQVQMSGEVRDKSYLLPPQPVKQFLISPPASPPVGWKQSEDAMPVINYDLLCAVSKLGPGEKYELHAGTESTPSVVVHVCESETEEEEETKNPKQKIAQTRRPDPPTAALNEPQTFDCAL

SEQ ID NO: 3749 - protein, 974 aa, Homo sapiens
MAARWSSENVVVEFRDSQATAMSVDCLGQHAVLSGRRFLYIVNLDAPFEGHRKISRQSKWDIGAVQWNPHDSFAHYFAASSNQRVDLYKWKDGSGEVGTTLQGHTRVISDLDWAVFEPDLLVTSSVDTYIYIWDIKDTRKPTVALSAVAGASQVKWNKKNANCLATSHDGDVRIWDKRKPSTAVEYLAAHLSKIHGLDWHPDSEHILATSSQDNSVKFWDYRQPRKYLNILPCQVPVWKARYTPFSNGLVTVMVPQLRRENSLLLWNVFDLNTPVHTFVGHDDVVLEFQWRKQKEGSKDYQLVTWSRDQTLRMWRVDSQMQRLCANDILDGVDEFIESISLLPEPEKTLHTEDTDHQHTASHGEEEALKEDPPRNLLEERKSDQLGLPQTLQQEFSLINVQIRNVNVEMDAADRSCTVSVHCSNHRVKMLVKFPAQYPNNAAPSFQFINPTTITSTMKAKLLKILKDTALQKVKRGQSCLEPCLRQLVSCLESFVNQEDSASSNPFALPNSVTPPLPTFARVTTAYGSYQDANIPFPRTSGARFCGAGYLVYFTRPMTMHRAVSPTEPTPRSLSALSAYHTGLIAPMKIRTEAPGNLRLYSGSPTRSEKEQVSISSFYYKERKSRRWKSKREGSDSGNRQIKAAGKVIIQDIACLLPVHKSLGELYILNVNDIQETCQKNAASALLVGRKDLVQVWSLATVATDLCLGPKSDPDLETPWARHPFGRQLLESLLAHYCRLRDVQTLAMLCSVFEAQSRPQGLPNPFGPFPNRSSNLVVSHSRYPSFTSSGSCSSMSDPGLNTGGWNIAGREAEHLSSPWGESSPEELRFGSLTYSDPRERERDQHDKNKRLLDPANTQQFDDFKKCYGEILYRWGLREKRAEVLKFVSCPPDPHKGIEFGVYCSHCRSEVRGTQCAICKGFTFQCAICHVAVRGSSNFCLTCGHGGHTSHMMEWFRTQEVCPTGCGCHCLLESTF

SEQ ID NO: 3750 - protein, 995 aa, Homo sapiens
MSAEAADREAATSSRPCTPPQTCWFEFLLEESLLEKHLRKPCPDPAPVQLIVQFLEQASKPSVNEQNQVQPPPDNKRNRILKLLALKVAAHLKWDLDILEKSLSVPVLNMLLNELLCISKVPPGTKHVDMDLATLPPTTAMAVLLYNRWAIRTIVQSSFPVKQAKPGPPQLSVMNQMQQEKELTENILKVLKEQAADSILVLEAALKLNKDLYVHTMRTLDLLAMEPGMVNGETESSTAGLKVKTEEMQCQVCYDLGAAYFQQGSTNSAVYENAREKFFRTKELIAEIGSLSLHCTIDEKRLAGYCQACDVLVPSSDSTSQQLTPYSQVHICLRSGNYQEVIQIFIEDNLTLSLPVQFRQSVLRELFKKAQQGNEALDEICFKVCACNTVRDILEGRTISVQFNQLFLRPNKEKIDFLLEVCSRSVNLEKASESLKGNMAAFLKNVCLGLEDLQYVFMISSHELFITLLKDEERKLLVDQMRKRSPRVNLCIKPVTSFYDIPASASVNIGQLEHQLILSVDPWRIRQILIELHGMTSERQFWTVSNKWEVPSVYSGVILGIKDNLTRDLVYILMAKGLHCSTVKDFSHAKQLFAACLELVTEFSPKLRQVMLNEMLLLDIHTHEAGTGQAGERPPSDLISRVRGYLEMRLPDIPLRQVIAEECVAFMLNWRENEYLTLQVPAFLLQSNPYVKLGQLLAATCKELPGPKESRRTAKDLWEVVVQICSVSSQHKRGNDGRVSLIKQRESTLGIMYRSELLSFIKKLREPLVLTIILSLFVKLHNVREDIVNDITAEHISIWPSSIPNLQSVDFEAVAITVKELVRYTLSINPNNHSWLIIQADIYFATNQYSAALHYYLQAGAVCSDFFNKAVPPDVYTDQVIKRMIKCCSLLNCHTQVAILCQFLREIDYKTAFKSLQEQNSHDAMDSYYDYIWDVTILEYLTYLHHKRGETDKRQIAIKAIGQTELNASNPEEVLQLAAQRRKKKFLQAMAKLYF

SEQ ID NO: 3751 - protein, 215 aa, Homo sapiens
MVLLTMIARVADGLPLAASMQEDEQSGRDLQQYQSQAKQLFRKLNEQSPTRCTLEAGAMTFHYIIEQGVCYLVLCEAAFPKKLAFAYLEDLHSEFDEQHGKKVPTVSRPYSFIEFDTFIQKTKKLYIDSRARRNLGSINTELQDVQRIMVANIEEVLQRGEALSALDSKANNLSSLSKKYRQDAKYLNMRSTYAKLAAVAVFFIMLIVYVRFWWL

SEQ ID NO: 3752 - protein, 146 aa, Homo sapiens
MESDFYLRYYVGHKGKFGHEFLEFEFRPDGKLRYANNSNYKNDVMIRKEAYVHKSVMEELKRIIDDSEITKEDDALWPPPDRVGRQELEIVIGDEHISFTTSKIGSLIDVNQSKDPEGLRVFYYLVQDLKCLVFSLIGLHFKIKPI

SEQ ID NO: 3753 - protein, 466 aa, Homo sapiens
MSYPGYPPTGYPPFPGYPPAGQESSFPPSGQYPYPSGFPPMGGGAYPQVPSSGYPGAGGYPAPGGYPAPGGYPGAPQPGGAPSYPGVPPGQGFGVPPGGAGFSGYPQPPSQSYGGGPAQVPLPGGFPGGQMPSQYPGGQPTYPSQPATVTQVTQGTIRPAANFDAIRDAEILRKAMKGFGTDEQAIVDVVANRSNDQRQKIKAAFKTSYGKDLIKDLKSELSGNMEELILALFMPPTYYDAWSLRKAMQGAGTQERVLIEILCTRTNQEIREIVRCYQSEFGRDLEKDIRSDTSGHFERLLVSMCQGNRDENQSINHQMAQEDAQRLYQAGEGRLGTDESCFNMILATRSFPQLRATMEAYSRMANRDLLSSVSREFSGYVESGLKTILQCALNRPAFFAERLYYAMKGAGTDDSTLVRIVVTRSEIDLVQIKQMFAQMYQKTLGTMIAGDTSGDYRRLLLAIVGQ

SEQ ID NO: 3754 - protein, 488 aa, Homo sapiens
MSYPGYPPTGYPPFPGYPPAGQESSFPPSGQYPYPSGFPPMGGGAYPQVPSSGYPGAGGYPAPGGYPAPGGYPGAPQPGGAPSYPGVPPGQGFGVPPGGAGFSGYPQPPSQSYGGGPAQVPLPGGFPGGQMPSQYPGGQPTYPSQINTDSFSSYPVFSPVSLDYSSEPATVTQVTQGTIRPAANFDAIRDAEILRKAMKGFGTDEQAIVDVVANRSNDQRQKIKAAFKTSYGKDLIKDLKSELSGNMEELILALFMPPTYYDAWSLRKAMQGAGTQERVLIEILCTRTNQEIREIVRCYQSEFGRDLEKDIRSDTSGHFERLLVSMCQGNRDENQSINHQMAQEDAQRLYQAGEGRLGTDESCFNMILATRSFPQLRATMEAYSRMANRDLLSSVSREFSGYVESGLKTILQCALNRPAFFAERLYYAMKGAGTDDSTLVRIVVTRSEIDLVQIKQMFAQMYQKTLGTMIAGDTSGDYRRLLLAIVGQ

SEQ ID NO: 3755 - protein, 447 aa, Homo sapiens
MRSVSYVQRVALEFSGSLFPHAICLGDVDNDTLNELVVGDTSGKVSVYKNDDSRPWLTCSCQGMLTCAGVGDVCNKGKNLLVAVSAEGWFHLFDLTPAKVLDASGHHETLIGEEQRPVFKQHIPANTKVMLISDIDGDGCRELVVGYTDRVVRAFRWEELGEGPEHLTGQLVSLKKWMLEGQVDSLSVTLGPLGLPELMVSQPGCAYAILLCTWKKDTGSPPASEGPTDGSRETPAARDVVLHQTSGRIHNKNVSTHLIGNIKQGHGTESSGSGLFALCTLDGTLKLMEEMEEADKLLWSVQVDHQLFALEKLDVTGNGHEEVVACAWDGQTYIIDHNRTVVRFQVDENIRAFCAGLYACKEGRNSPCLVYVTFNQKIYVYWEVQLERMESTNLVKLLETKPEYHSLLQELGVDPDDLPVTRALLHQTLYHPDQPPQCAPSSLQDPT

SEQ ID NO: 3756 - protein, 532 aa, Homo sapiens
MIQAQESITLEDVAVDFTWEEWQLLGAAQKDLYRDVMLENYSNLVAVGYQASKPDALFKLEQGEQLWTIEDGIHSGACSDIWKVDHVLERLQSESLVNRRKPCHEHDAFENIVHCSKSQFLLGQNHDIFDLRGKSLKSNLTLVNQSKGYEIKNSVEFTGNGDSFLHANHERLHTAIKFPASQKLISTKSQFISPKHQKTRKLEKHHVCSECGKAFIKKSWLTDHQVMHTGEKPHRCSLCEKAFSRKFMLTEHQRTHTGEKPYECPECGKAFLKKSRLNIHQKTHTGEKPYICSECGKGFIQKGNLIVHQRIHTGEKPYICNECGKGFIQKTCLIAHQRFHTGKTPFVCSECGKSCSQKSGLIKHQRIHTGEKPFECSECGKAFSTKQKLIVHQRTHTGERPYGCNECGKAFAYMSCLVKHKRIHTREKQEAAKVENPPAERHSSLHTSDVMQEKNSANGATTQVPSVAPQTSLNISGLLANRNVVLVGQPVVRCAASGDNRGFAQDRNLVNAVNVVVPSVINYVLFYVTENP

SEQ ID NO: 3757 - protein, 1221 aa, Homo sapiens
MLRSTGFFRAIDCPYWSGAPGGPCRRPYCHFRHRGARGPGAPGDGGEAPPAAGLGYDPYNPELPKPPAQRENGTLGLGEEPRPDVLELELVNQAIEAVRSEVELEQRRYRELLETTREHRSAEAPALAPRGPNASPTVGPDEDAFPLAFDYSPGSHGLLSPDAGYQPTPLAAPAEPGSKYSLASLDRGQGRGGGGGGALEYVPKAVSQPRRHSRPVPSGKYVVDNSRPPTDLEYDPLSNYSARHLSRASSRDERAAKRPRGSRGSEPYTPAPKKLCDPFGSCDARFSDSEDEAATVPGNEPTTASTPKARADPEIKATGQPPSKEGLEAEGGGLRETKETAVQCDVGDLQPPPAKPASPAQVQSSQDGGCPKEGKPKKKKTGAPPAPSCKDGAQGKDKTKDKGRGRPVEKPRADKKGPQASSPRRKAERPEGTKKKPSSATPVATSGKGRPDRPARRPSPTSGDSRPAAGRGPPRPLQLPDRKSTKAPSGKLVERKARSLDEGASQDAPKLKKRALSHADLFGDESEDEAAGPGVPSVWPSALPSLSSDSDSDSDSSLGFPEAQGPPKRLKASPPPSPAPSSSSSSSSSTSSAGADVDYSALEKEVDFDSDPMEECLRIFNESTSVKTEDRGRLARQPPKEEKSEEKGLSGLTTLFPGQKRRISHLSKQGQEVEPPRRGPAVPPARPPTAQEVCYLRAQQAQRASASLLQAPARLAEKSPSVHISAPGEKRRIAHIPNPRLAAAPTGAKRTLAASGSQPSNGPEPGGQQLKTRTLSGMASKTTTTIIPKRIAHSPSLQSLKKPIIPKEFGGKVPTVIRQRYLNLFIEECLKFCTSNQEAIEKALNEEKVAYDRSPSKNIYLNVAVNTLKKLRGLAPSAVPGLSKTSGRRVVSHEVVLGGRLAAKTSFSLSRPSSPRVEDLKGAALYSRLREYLLTQDQLKENGYPFPHPERPGGAIIFTAEEKRPKDSSCRTCCRCGTEYLVSSSGRCIRDEECYYHWGRLRRNRVAGGWETQYMCCSAAAGSVGCQVAKQHVQDGRKERLEGFVKTFEKELSGDTHPGIYALDCEMSYTTYGLELTRVTVVDTDVHVVYDTFVKPDNEIVDYNTRFSGVTEADLADTSVTLRDVQAVLLSMFSADTILIGHSLESDLLALKVIHSTVVDTSVLFPHRLGLPYKRSLRNLMADYLRQIIQDNVDGHSSSEDAGACMHLVIWKVREDAKTKR

SEQ ID NO: 3758 - protein, 379 aa, Homo sapiens
MPHSSLHPSIPCPRGHGAQKAALVLLSACLVTLWGLGEPPEHTLRYLVLHLASLQLGLLLNGVCSLAEELRHIHSRYRGSYWRTVRACLGCPLRRGALLLLSIYFYYSLPNAVGPPFTWMLALLGLSQALNILLGLKGLAPAEISAVCEKGNFNVAHGLAWSYYIGYLRLILPELQARIRTYNQHYNNLLRGAVSQRLYILLPLDCGVPDNLSMADPNIRFLDKLPQQTGDHAGIKDRVYSNSIYELLENGQRAGTCVLEYATPLQTLFAMSQYSQAGFSREDRLEQAKLFCRTLEDILADAPESQNNCRLIAYQEPADDSSFSLSQEVLRHLRQEEKEEVTVGSLKTSAVPSTSTMSQEPELLISGMEKPLPLRTDFS

SEQ ID NO: 3759 - protein, 373 aa, Homo sapiens
MRTETNLAGDRGAEPGVANQLSHRILPQDGIKRAQPPPHTPATGTRSSYRLLPQKGRGNLRGAPTAPVSFSRIRRNPLRTQLSGSPPRRPTSVLRLASPAGDLPRRPRPRAGGGRHSPRPAVGTIFRGGRKGRLREGRGALRGSGKRRGWGLRPQRVRSRLAGLGAPRGGAAAPRGWGGQGAERLGVHQPGLPTHAALRGGGGGSEGGGGGARPSPPRARQPPSGRPRPRRTRLLGSAERHTGRAALARHGQLSRPHAAVRNSSRGRGAATSVSAAARPTRGGARGHRRADGRARGGCAQLRAGTPSAPGGLQDCRGRQGEENAHPFRSGAPFSPHPHASRSTLAAQLLPLPQPPPPPKLAPPPLPPWLSAVT

SEQ ID NO: 3760 - protein, 373 aa, Homo sapiens; identical to SEQ ID NO: 3759

SEQ ID NO: 3761 - protein, 1366 aa, Homo sapiens
MLAVGPAMDRDYPQHEPPPAGSLLYSPPPLQSAMLHCPYWNTFSLPPYPAFSSDSRPFMSSASFLGSQPCPDTSYAPVATASSLPPKTCDFAQDSSYFEDFSNISIFSSSVDSLSDIVDTPDFLPADSLNQVSTIWDDNPAPSTHDKLFQLSRPFAGFEDFLPSHSTPLLVSYQEQSVQSQPEEEDEAEEEEAEELGHTETYADYVPSKSKIGKQHPDRVVETSTLSSVPPPDITYTLALPSDSGALSALQLEAITYACQQHEVLLPSGQRAGFLIGDGAGVGKGRTVAGVILENHLRGRKKALWFSVSNDLKYDAERDLRDIEATGIAVHALSKIKYGDTTTSEGVLFATYSALIGESQAGGQHRTRLRQILDWCGEAFEGVIVFDECHKAKNAGSTKMGKAVLDLQNKLPLARVVYASATGASEPRNMIYMSRLGIWGEGTPFRNFEEFLHAIEKRGVGAMEIVAMDMKVSGMYIARQLSFSGVTFRIEEIPLAPAFECVYNRAALLWAEALNVFQQAADWIGLESRKSLWGQFWSAHQRFFKYLCIAAKVRRLVELAREELARDKCVVIGLQSTGEARTREVLGENDGHLNCFVSAAEGVFLSLIQKHFPSTKRKRDRGAGSKRKRRPRGRGAKAPRLACETAGVIRISDDSSTESDPGLDSDFNSSPESLVDDDVVIVDAVGLPSDDRGSLCLLQRDPHGPGVLERVERLKQDLLDKVRRLGRELPVNTLDELIDQLGGPQRVAEMTGRKGRVVSRPDGTVAFESRAEQGLSIDHVNLREKQRFMSGEKLVAIISEASSSGVSLQADRRVQNQRRRVHMTLELPWSADRAIQQFGRTHRSNQVSAPEYVFLISELAGERRFASIVAKRLESLGALTHGDRRATESRDLSKYNFENKYGTRALHCVLTTILSQTENKVPVPQGYPGGVPTFFRDMKQGLLSVGIGGRESRNGCLDVEKDCSITKFLNRILGLEVHKQNALFQYFSDTFDHLIEMDKREGKYDMGILDLAPGIEEIYEESQQVFLAPGHPQDGQVVFYKISVDRGLKWEDAFAKSLALTGPYDGFYLSYKVRGNKPSCLLAEQNRGQFFTVYKPNIGRQSQLEALDSLRRKFHRVTAEEAKEPWESGYALSLTHCSHSAWNRHCRLAQEGKDCLQGLRLRHHYMLCGALLRVWGRIAAVMADVSSSSYLQIVRLKTKDRKKQVGIKIPEGCVRRVLQELRLMDADVKRRQAPALGCPAPPAPRPLALPCGPGEVLDLTYSPPAEAFPPPPHFSFPAPLSLDAGPGVVPLGTPDAQADPAALAHQGCDINFKEVLEDMLRSLHAGPPSEGALGEGAGAGGAAGGGPERQSVIQFSPPFPGAQAPL

SEQ ID NO: 3762 - protein, 173 aa, Homo sapiens
MARMNRPAPVEVTYKNMRFLITHNPTNATLNKFIEELKKYGVTTIVRVCEATYDTTLVEKEGIHVLDWPFDDGAPPSNQIVDDWLSLVKIKFREEPGCCIAVHCVAGLGRAPVLVALALIEGGMKYEDAVQFIRQKRRGAFNSKQLLYLEKYRPKMRLRFKDSNGHRNNCCIQ

SEQ ID NO: 3763 - protein, 152 aa, Homo sapiens
MSTPARRRLMRDFKRLQEDPPAGVSGAPSENNIMVWNAVIFGPEGTPFEDGTFKLTIEFTEEYPNKPPTVRFVSKMFHPNVYADGSICLDILQNRWSPTYDVSSILTSIQSLLDEPNPNSPANSQAAQLYQENKREYEKRVSAIVEQSWRDC

SEQ ID NO: 3764 - protein, 122 aa, Homo sapiens
MSTPARRRLMRDFKRLQEDPPAGVSGAPSENNIMVWNAVIFGPEGTPFEDVYADGSICLDILQNRWSPTYDVSSILTSIQSLLDEPNPNSPANSQAAQLYQENKREYEKRVSAIVEQSWRDC

SEQ ID NO: 3765 - protein, 77 aa, Homo sapiens
MFHPNVYADGSICLDILQNRWSPTYDVSSILTSIQSLLDEPNPNSPANSQAAQLYQENKREYEKRVSAIVEQSWRDC

SEQ ID NO: 3766 - protein, 440 aa, Homo sapiens
MPVFLDPADIATLEGISWRLPSAPSDEASFPGKEALAAFLGWFDYCDHLITEAHTVVADALAKAVAENFFVETLQPQLLHVSEQSILTSTALLTAMLRQLRSPALLREAVAFLLGTDRQPEAPGDNPHTLYAHLIGHCDHLSDEISITTLRLFEELLQKPHEGIIHSLVLRNLEGRPYVAWGSPEPESYEDTLDLEEDPYFTDSFLDSGFQTPAKPRLAPATSYDGKTAVTEIVNSFLCLVPEEAKTSAFLEETGYDTYVHDAYGLFQECSSRVASWGWPLTPTPLDPHEPERPFFEGHFLRVLFDRMSRILDQPYSLNLQVTSVLSRLALFPHPHIHEYLLDPYISLAPGCRSLFSVLVRVIGDLMQRIQRVPQFPGKLLLVRKQLTGQAPGEQLDHQTLLQGVVVLEEFCKELAAIAFVKFPPHDPRQNVSPAPEGQV

SEQ ID NO: 3767 - protein, 497 aa, Homo sapiens
MSQDGASQFQEVIRQELELSVKKELEKILTTASSHEFEHTKKDLDGFRKLFHRFLQEKGPSVDWGKIQRPPEDSIQPYEKIKARGLPDNISSVLNKLVVVKLNGGLGTSMGCKGPKSLIGVRNENTFLDLTVQQIEHLNKTYNTDVPLVLMNSFNTDEDTKKILQKYNHCRVKIYTFNQSRYPRINKESLLPVAKDVSYSGENTEAWYPPGHGDIYASFYNSGLLDTFIGEGKEYIFVSNIDNLGATVDLYILNHLMNPPNGKRCEFVMEVTNKTRADVKGGTLTQYEGKLRLVEIAQVPKAHVDEFKSVSKFKIFNTNNLWISLAAVKRLQEQNAIDMEIIVNAKTLDGGLNVIQLETAVGAAIKSFENSLGINVPRSRFLPVKTTSDLLLVMSNLYSLNAGSLTMSEKREFPTVPLVKLGSSFTKVQDYLRRFESIPDMLELDHLTVSGDVTFGKNVSLKGTVIIIANHGDRIDIPPGAVLENKIVSGNLRILDH

SEQ ID NO: 3768 - protein, 508 aa, Homo sapiens
MSRFVQDLSKAMSQDGASQFQEVIRQELELSVKKELEKILTTASSHEFEHTKKDLDGFRKLFHRFLQEKGPSVDWGKIQRPPEDSIQPYEKIKARGLPDNISSVLNKLVVVKLNGGLGTSMGCKGPKSLIGVRNENTFLDLTVQQIEHLNKTYNTDVPLVLMNSFNTDEDTKKILQKYNHCRVKIYTFNQSRYPRINKESLLPVAKDVSYSGENTEAWYPPGHGDIYASFYNSGLLDTFIGEGKEYIFVSNIDNLGATVDLYILNHLMNPPNGKRCEFVMEVTNKTRADVKGGTLTQYEGKLRLVEIAQVPKAHVDEFKSVSKFKIFNTNNLWISLAAVKRLQEQNAIDMEIIVNAKTLDGGLNVIQLETAVGAAIKSFENSLGINVPRSRFLPVKTTSDLLLVMSNLYSLNAGSLTMSEKREFPTVPLVKLGSSFTKVQDYLRRFESIPDMLELDHLTVSGDVTFGKNVSLKGTVIIIANHGDRIDIPPGAVLENKIVSGNLRILDH

SEQ ID NO: 3769 - protein, 216 aa, Homo sapiens
MWPPCGTLRTLALARSRGARACSGDGGVSYTQGQSPEPRTREYFYYVDHQGQLFLDDSKMKNFITCFKDPQFLVTFFSRLRPNRSGRYEAAFPFLSPCGRERNFLRCEDRPVVFTHLLTADHGPPRLSYCGGGEALAVPFEPARLLPLAANGRLYHPAPERAGGVGLVRSALAFELSACFEYGPGAPALPSHVRWQGRRLALTMDLAPLLLAARSP

SEQ ID NO: 3770 - protein, 463 aa, Homo sapiens
MAQGLVTFADVAIDFSQEEWACLNSAQRDLYWDVMLENYSNLVSLDLESAYENKSLPTEKNIHEIRASKRNSDRRSKSLGRNWICEGTLERPQRSRGRYVNQMIINYVKRPATREGTPPRTHQRHHKENSFECKDCGKAFSRGYQLSQHQKIHTGEKPYECKECKKAFRWGNQLTQHQKIHTGEKPYECKDCGKAFRWGSSLVIHKRIHTGEKPYECKDCGKAFRRGDELTQHQRFHTGEKDYECKDCGKTFSRVYKLIQHKRIHSGEKPYECKDCGKAFICGSSLIQHKRIHTGEKPYECQECGKAFTRVNYLTQHQKIHTGEKPHECKECGKAFRWGSSLVKHERIHTGEKPYKCTECGKAFNCGYHLTQHERIHTGGTPYKCKECGKAFIYGSSLVKHERIHTGVKPYGCTECGKSFSHGHQLTQHQKTHSGAKSYECKECGKACNHLNHLREHQRIHNS

SEQ ID NO: 3771 - protein, 262 aa, Homo sapiens
MLALEAAQLDGPHFSCLYPDGVFYDLDSCKHSSYPDSEGAPDSLWDWTVAPPVPATPYEAFDPAAAAFSHPQAAQLCYEPPTYSPAGNLELAPSLEAPGPGLPAYPTENFASQTLVPPAYAPYPSPVLSEEEDLPLDSPALEVSDSESDEALVAGPEGKGSEAGTRKKLRLYQFLLGLLTRGDMRECVWWVEPGAGVFQFSSKHKELLARRWGQQKGNRKRMTYQKLARALRNYAKTGEIRKVKRKLTYQFDSALLPAVRRA

SEQ ID NO: 3772 - protein, 575 aa, Homo sapiens
MDERLSLLRSPPPPSARHRAHPPQRPASSGGAHTLVNHGYAEPAAGRELPPDMTVVPGDHLLEPEVADGGGAPPQGGCGGGGCDRYEPLPPSLPAAGEQDCCGERVVINISGLRFETQLKTLCQFPETLLGDPKRRMRYFDPLRNEYFFDRNRPSFDAILYYYQSGGRIRRPVNVPIDIFSEEIRFYQLGEEAMEKFREDEGFLREEERPLPRRDFQRQVWLLFEYPESSGPARGIAIVSVLVILISIVIFCLETLPEFRDEKDYPASTSQDSFEAAGNSTSGSRAGASSFSDPFFVVETLCIIWFSFELLVRFFACPSKATFSRNIMNLIDIVAIIPYFITLGTELAERQGNGQQAMSLAILRVIRLVRVFRIFKLSRHSKGLQILGQTLKASMRELGLLIFFLFIGVILFSSAVYFAEADDPTSGFSSIPDAFWWAVVTMTTVGYGDMHPVTIGGKIVGSLCAIAGVLTIALPVPVIVSNFNYFYHRETEGEEQSQYMHVGSCQHLSSSAEELRKARSNSTLSKSEYMVIEEGGMNHSAFPQTPFKTGNSTATCTTNNNPNSCVNIKKIFTDV

SEQ ID NO: 3773 - protein, 82 aa, Homo sapiens
MAVFHDEVEIEDFQYDEDSETYFYPCPCGDNFSITKEDLENGEDVATCPSCSLIIKVIYDKDQFVCGETVPAPSANKELVKC

SEQ ID NO: 3774 - protein, 227 aa, Homo sapiens
MGRPLLLPLLLLLQPPAFLQPGGSTGSGPSYLYGVTQPKHLSASMGGSVEIPFSFYYPWELAIVPNVRISWRRGHFHGQSFYSTRPPSIHKDYVNRLFLNWTEGQESGFLRISNLRKEDQSVYFCRVELDTRRSGRQQLQSIKGTKLTITQAVTTTTTWRPSSTTTIAGLRVTESKGHSESWHLSLDTAIRVALAVAVLKTVILGLLCLLLLWWRRRKGSRAPSSDF

SEQ ID NO: 3775 - protein, 149 aa, Homo sapiens
MGRPLLLPLLLLLQPPAFLQPGLCEPALSELDRGSGERLPQDLKPAEGGPVCVFLPSRAGHPEIREAAVAVHQGDQTHHHPGCHNHHHLEAQQHNHHSRPQGHRKQRALRIMAPKSGHCHQGCIGCRCAQNCHFGTAVPPPPVVEEKER

SEQ ID NO: 3776 - protein, 227 aa, Homo sapiens; identical to SEQ ID NO: 3774

SEQ ID NO: 3777 - protein, 478 aa, Homo sapiens
MLSDELESKPELLVQFVQNTSIPLGQGLVESEAKDITCLSLLPVTEASECSRLMLPDDTTNHSNSSKEVPSSAVLRSLRVNVGPDGEETRAQTVQKSPEFLSTSESSSLLQDLQPSDSTSFILLNLTRAGLGSSAEHLVFVQDEAEDSGNDFLSSESTDSSIPWFLRVQELAHDSLIAATRAQLAKNAKTSSNGENVHLGSGDGQSKDSGPLPQVEKKLKCTVEGCDRTFVWPAHFKYHLKTHRNDRSFICPAEGCGKSFYVLQRLKVHMRTHNGEKPFMCHESGCGKQFTTAGNLKNHRRIHTGEKPFLCEAQGCGRSFAEYSSLRKHLVVHSGEKPHQCQVCGKTFSQSGSRNVHMRKHHLQLGAAGSQEQEQTAEPLMGSSLLEEASVPSKNLVSMNSQPSLGGESLNLPNTNSILGVDDEVLAEGSPRSLSSVPDVTHHLVTMQSGRQSYEVSVLTAVNPQELLNQGDLTERRT

SEQ ID NO: 3778 - protein, 136 aa, Homo sapiens
MQPLHWRRIFICQVAGPLASLILLNPARTYLQGAHFPRRASLEGGASQNAEDSGLLRLRSDAPQPWDQCPSPACQFPFSLHHEHKFGWELSLFIHFILSSHSVPGPDLCTAKRAGNSKTLSSHRGPWRMNAGGGHG

SEQ ID NO: 3779 - protein, 800 aa, Homo sapiens
MAANVGDQRSTDWSSQYSMVAGAGRENGMETPMHENPEWEKARQALASISKSGAAGGSAKSSSNGPVASAQYVSQAEASALQQQQYYQWYQQYNYAYPYSYYYPMSMYQSYGSPSQYGMAGSYGSATPQQPSAPQHQGTLNQPPVPGMDESMSYQAPPQQLPSAQPPQPSNPPHGAHTLNSGPQPGTAPATQHSQAGPATGQAYGPHTYTEPAKPKKGQQLWNRMKPAPGTGGLKFNIQKRPFAVTTQSFGSNAEGQHSGFGPQPNPEKVQNHSGSSARGNLSGKPDDWPQDMKEYVERCFTACESEEDKDRTEKLLKEVLQARLQDGSAYTIDWSREPLPGLTREPVAESPKKKRWEAASSLHPPRGAGSATRGGGAPSQRGTPGAGGAGRARGNSFTKFGNRNVFMKDNSSSSSTDSRSRSSSRSPTRHFRRSDSHSDSDSSYSGNECHPVGRRNPPPKGRGGRGAHMDRGRGRAQRGKRHDLAPTKRSRKKMAALECEDPERELKKQKRAARFQHGHSRRLRLEPLVLQMSSLESSGADPDWQELQIVGTCPDITKHYLRLTCAPDPSTVRPVAVLKKSLCMVKCHWKEKQDYAFACEQMKSIRQDLTVQGIRTEFTVEVYETHARIALEKGDHEEFNQCQTQLKSLYAENLPGNVGEFTAYRILYYIFTKNSGDITTELAYLTRELKADPCVAHALALRTAWALGNYHRFFRLYCHAPCMSGYLVDKFADRERKVALKAMIKTFRPALPVSYLQAELAFEGEAACRAFLEPLGLAYTGPDNSSIDCRLSLAQLSAF

SEQ ID NO: 3780 - protein, 312 aa, Homo sapiens
MAAGQNGHEEWVGSAYLFVESSLDKVVLSDAYAHPQQKVAVYRALQAALAESGGSPDVLQMLKIHRSDPQLIVQLRFCGRQPCGRFLRAYREGALRAALQRSLAAALAQHSVPLQLELRAGAERLDALLADEERCLSCILAQQPDRLRDEELAELEDALRNLKCGSGARGGDGEVASAPLQPPVPSLSEVKPPPPPPPAQTFLFQGQPVVNRPLSLKDQQTFARSVGLKWRKVGRSLQRGCRALRDPALDSLAYEYEREGLYEQAFQLLRRFVQAEGRRATLQRLVEALEENELTSLAEDLLGLTDPNGGLA

SEQ ID NO: 3781 - protein, 252 aa, Homo sapiens
MLKIHRSDPQLIVQLRFCGRQPCGRFLRAYREGALRAALQRSLAAALAQHSVPLQLELRAGAERLDALLADEERCLSCILAQQPDRLRDEELAELEDALRNLKCGSGARGGDGEVASAPLQPPVPSLSEVKPPPPPPPAQTFLFQGQPVVNRPLSLKDQQTFARSVGLKWRKVGRSLQRGCRALRDPALDSLAYEYEREGLYEQAFQLLRRFVQAEGRRATLQRLVEALEENELTSLAEDLLGLTDPNGGLA

SEQ ID NO: 3782 - protein, 619 aa, Homo sapiens
MASGAYNPYIEIIEQPRQRGMRFRYKCEGRSAGSIPGEHSTDNNRTYPSIQIMNYYGKGKVRITLVTKNDPYKPHPHDLVGKDCRDGYYEAEFGQERRPLFFQNLGIRCVKKKEVKEAIITRIKAGINPFNVPEKQLNDIEDCDLNVVRLCFQVFLPDEHGNLTTALPPVVSNPIYDNRAPNTAELRICRVNKNCGSVRGGDEIFLLCDKVQKDDIEVRFVLNDWEAKGIFSQADVHRQVAIVFKTPPYCKAITEPVTVKMQLRRPSDQEVSESMDFRYLPDEKDTYGNKAKKQKTTLLFQKLCQDHVETGFRHVDQDGLELLTSGDPPTLASQSAGITVNFPERPRPGLLGSIGEGRYFKKEPNLFSHDAVVREMPTGVSSQAESYYPSPGPISSGLSHHASMAPLPSSSWSSVAHPTPRSGNTNPLSSFSTRTLPSNSQGIPPFLRIPVGNDLNASNACIYNNADDIVGMEASSMPSADLYGISDPNMLSNCSVNMMTTSSDSMGETDNPRLLSMNLENPSCNSVLDPRDLRQLHQMSSSSMSAGANSNTTVFVSQSDAFEGSDFSCADNSMINESGPSNSTNPNSHGFVQDSQYSGIGSMQNEQLSDSFPYEFFQV

SEQ ID NO: 3783 - protein, 305 aa, Homo sapiens
MENSQLCKLFIGGLNVQTSESGLRGHFEAFGTLTDCVVVVNPQTKRSRCFGFVTYSNVEEADAAMAASPHAVDGNTVELKRAVSREDSARPGAHAKVKKLFVGGLKGDVAEGDLIEHFSQFGTVEKAEIIADKQSGKKRGFGFVYFQNHDAADKAAVVKFHPIQGHRVEVKKAVPKEDIYSGGGGGGSRSSRGGRGGRGRGGGRDQNGLSKGGGGGYNSYGGYGGGGGGGYNAYGGGGGGSSYGGSDYGNGFGGFGSYSQHQSSYGPMKSGGGGGGGGSSWGGRSNSGPYRGGYGGGGGYGGSSF

SEQ ID NO: 3784 - protein, 133 aa, Homo sapiens [sequence omitted]

SEQ ID NO: 3785 - protein, 130 aa, Homo sapiens
MNDTVTIRTRKFMTNRLLQRKQMVIDVLHPGKATVPKTEIREKLAKMYKTTPDVIFVFGFRTHFGGGKTTGFGMIYDSLDYAKKNEPKHRLARHGLYEKKKTSRKQRKERKNRMKKVRGTAKANVGAGKK

SEQ ID NO: 3786 - protein, 98 aa, Homo sapiens
MLSRLQELRKEEETLLRLKAALHDQLNRLKVEELALQSMISSRRGDEMLSSHTVPEQSHDMLVHVDNEASINQTTLELSTKSHVTEEEEEEEEEESDS

SEQ ID NO: 3787 - protein, 504 aa, Homo sapiens
MEAAATPAAAGAARREELDMDVMRPLINEQNFDGTSDEEHEQELLPVQKHYQLDDQEGISFVQTLMHLLKGNIGTGLLGLPLAIKNAGIVLGPISLVFIGIISVHCMHILVRCSHFLCLRFKKSTLGYSDTVSFAMEVSPWSCLQKQAAWGRSVVDFFLVITQLGFCSVYIVFLAENVKQVHEGFLESKVFISNSTNSSNPCERRSVDLRIYMLCFLPFIILLVFIRELKNLFVLSFLANVSMAVSLVIIYQYVVRNMPDPHNLPIVAGWKKYPLFFGTAVFAFEGIGVVLPLENQMKESKRFPQALNIGMGIVTTLYVTLATLGYMCFHDEIKGSITLNLPQDVWLYQSVKILYSFGIFVTYSIQFYVPAEIIIPGITSKFHTKWKQICEFGIRSFLVSITCAGAILIPRLDIVISFVGAVSSSTLALILPPLVEILTFSKEHYNIWMVLKNISIAFTGVVGFLLGTYITVEEIIYPTPKVVAGTPQSPFLNLNSTCLTSGLK

SEQ ID NO: 3788 - protein, 731 aa, Homo sapiens
MASCPDSDNSWVLAGSESLPVETLGPASRMDPESERALQAPHSPSKTDGKELAGTMDGEGTLFQTESPQSGSILTEETEVKGTLEGDVCGVEPPGPGDTVVQGDLQETTVVTGLGPDTQDLEGQSPPQSLPSTPKAAWIREEGRCSSSDDDTDVDMEGLRRRRGREAGPPQPMVPLAVENQAGGEGAGGELGISLNMCLLGALVLLGLGVLLFSGGLSESETGPMEEVERQVLPDPEVLEAVGDRQDGLREQLQAPVPPDSVPSLQNMGLLLDKLAKENQDIRLLQAQLQAQKEELQSLMHQPKGLEEENAQLRGALQQGEAFQRALESELQQLRARLQGLEADCVRGPDGVCLSGGRGPQGDKAIREQGPREQEPELSFLKQKEQLEAEAQALRQELERQRRLLGSVQQDLERSLQDASRGDPAHAGLAELGHRLAQKLQGLENWGQDPGVSANASKAWHQKSHFQNSREWSGKEKWWDGQRDRKAEHWKHKKEESGRERKKNWGGQEDREPAGRWKEGRPRVEESGSKKEGKRQGPKEPPRKSGSFHSSGEKQKQPRWREGTKDSHDPLPSWAELLRPKYRAPQGCSGVDECARQEGLTFFGTELAPVRQQELASLLRTYLARLPWAGQLTKELPLSPAFFGEDGIFRHDRLRFRDFVDALEDSLEEVAVQQTGDDDEVDDFEDFIFSHFFGDKALKKRSGKKDKHSQSPRAAGPREGHSHSHHHHHRG

SEQ ID NO: 3789 - protein, 299 aa, Homo sapiens
MADHNPDSDSTPRTLLRRVLDTADPRTPRRPRSARAGARRALLETASPRKLSGQTRTIARGRSHGARSVGRSAHIQASGHLEEQTPRTLLKNILLTAPESSILMPESVVKPVPAPQAVQPSRQESSCGSLELQLPELEPPTTLAPGLLAPGRRKQRLRLSVFQQGVDQGLSLSQEPQGNADASSLTRSLNLTFATPLQPQSVQRPGLARRPPARRAVDVGAFLRDLRDTSLAPPNIVLEDTQPFSQPMVGSPNVYHSLPCTPHTGAEDAEQAAGRKTQSSGPGLQKNSECVALVAWSQI

SEQ ID NO: 3790 - protein, 216 aa, Homo sapiens
MGPRNPSPDHLSESESEEEENISYLNESSGEEWDSSEEEDSMVPNLSPLESLAWQVKCLLKYSTTWKPLNPNSWLYHAKLLDPSTPVHILREIGLRLSHCSHCVPKLEPIPEWPPLASCGVPPFQKPLTSPSRLSRDHATLNGALQFATKQLSRTLSRATPIPEYLKQIPNSCVSGCCCGRLTKTVKETTRTEPINTTYSYTDFQKAVNKLLTASL

SEQ ID NO: 3791 - protein, 1169 aa, Homo sapiens
MEPRESGKAPVTFDDITVYLLQEEWVLLSQQQKELCGSNKLVAPLGPTVANPELFRKFGRGPEPWLGSVQGQRSLLEHHPGKKQMGYMGEMEVQGPTRESGQSLPPQKKAYLSHLSTGSGHIEGDWAGRNRKLLKPRSIQKSWFVQFPWLIMNEEQTALFCSACREYPSIRDKRSRLIEGYTGPFKVETLKYHAKSKAHMFCVNALAARDPIWAARFRSIRDPPGDVLASPEPLFTADCPIFYPPGPLGGFDSMAELLPSSRAELEDPGGDGAIPAMYLDCISDLRQKEITDGIHSSSDINILYNDAVESCIQDPSAEGLSEEVPVVFEELPVVFEDVAVYFTREEWGMLDKRQKELYRDVMRMNYELLASLGPAAAKPDLISKLERRAAPWIKDPNGPKWGKGRPPGNKKMVAVREADTQASAADSALLPGSPVEARASCCSSSICEEGDGPRRIKRTYRPRSIQRSWFGQFPWLVIDPKETKLFCSACIERPNLHDKSSRLVRGYTGPFKVETLKYHEVSKAHRLCVNTVEIKEDTPHTALVPEISSDLMANMEHFFNAAYSIAYHSRPLNDFEKILQLLQSTGTVILGKYRNRTACTQFIKYISETLKREILEDVRNSPCVSVLLDSSTDASEQACVGIYIRYFKQMEVKESYITLAPLYSETADGYFETIVSALDELDIPFRKPGWVVGLGTDGSAMLSCRGGLVEKFQEVIPQLLPVHCVAHRLHLAVVDACGSIDLVKKCDRHIRTVFKFYQSSNKRLNELQEGAAPLEQEIIRLKDLNAVRWVASRRRTLHALLVSWPALARHLQRVAEAGGQIGHRAKGMLKLMRGFHFVKFCHFLLDFLSIYRPLSEVCQKEIVLITEVNATLGRAYVALESLRHQAGPKEEEFNASFKDGRLHGICLDKLEVAEQRFQADRERTVLTGIEYLQQRFDADRPPQLKNMEVFDTMAWPSGIELASFGNDDILNLARYFECSLPTGYSEEALLEEWLGLKTIAQHLPFSMLCKNALAQHCRFPLLSKLMAVVVCVPISTSCCERGFKAMNRIRTDERTKLSNEVLNMLMMTAVNGVAVTEYDPQPAIQHWYLTSSGRRFSHVYTCAQVPARSPASARLRKEEMGALYVEEPRTQKPPILPSREAAEVLKDCIMEPPERLLYPHTSQEAPGMS

SEQ ID NO: 3792 - protein, 1235 aa, Homo sapiens
MRSRSNSGVRLDGYARLVQQTILCYQNPVTGLLSASHEQKDAWVRDNIYSILAVWGLGMAYRKNADRDEDKAKAYELEQNVVKLMRGLLQCMMRQVAKVEKFKHTQSTKDSLHAKYNTATCGTVVGDDQWGHLQVDATSLFLLFLAQMTASGLRIIFTLDEVAFIQNLVFYIEAAYKVADYGMWERGDKTNQGIPELNASSVGMAKAALEAIDELDLFGAHGGRKSVIHVLPDEVEHCQSILFSMLPRASTSKEIDAGLLSIISFPAFAVEDVNLVNVTKNEIISKLQGRYGCCRFLRDGYKTPREDPNRLHYDPAELKLFENIECEWPVFWTYFIIDGVFSGDAVQVQEYREALEGILIRGKNGIRLVPELYAVPPNKVDEEYKNPHTVDRVPMGKVPHLWGQSLYILSSLLAEGFLAAGEIDPLNRRFSTSVKPDVVVQVTVLAENNHIKDLLRKHGVNVQSIADIHPIQVQPGRILSHIYAKLGRNKNMNLSGRPYRHIGVLGTSKLYVIRNQIFTFTPQFTDQHHFYLALDNEMIVEMLRIELAYLCTCWRMTGRPTLTFPISRTMLTNDGSDIHSAVLSTIRKLEDGYFGGARVKLGNLSEFLTTSFYTYLTFLDPDCDEKLFDNASEGTFSPDSDSDLVGYLEDTCNQESQDELDHYINHLLQSTSLRSYLPPLCKNTEDRHVFSAIHSTRDILSVMAKAKGLEVPFVPMTLPTKVLSAHRKSLNLVDSPQPLLEKVPESDFQWPRDDHGDVDCEKLVEQLKDCSNLQDQADILYILYVIKGPSWDTNLSGQHGVTVQNLLGELYGKAGLNQEWGLIRYISGLLRKKVEVLAEACTDLLSHQKQLTVGLPPEPREKIISAPLPPEELTKLIYEASGQDISIAVLTQEIVVYLAMYVRAQPSLFVEMLRLRIGLIIQVMATELARSLNCSGEEASESLMNLSPFDMKNLLHHILSGKEFGVERSVRPIHSSTSSPTISIHEVGHTGVTKTERSGINRLRSEMKQMTRRFSADEQFFSVGQAASSSAHSSKSARSSTPSSPTGTSSSDSGGHHIGWGERQGQWLRRRRLDGAINRVPVGFYQRVWKILQKCHGLSIDGYVLPSSTTREMTPHEIKFAVHVESVLNRVPQPEYRQLLVEAIMVLTLLSDTEMTSIGGIIHVDQIVQMASQLFLQDQVSIGAMDTLEKDQATGICHFFYDSAPSGAYGTMTYLTRAVASYLQELLPNSGCQMQ

SEQ ID NO: 3793 - protein, 339 aa, Homo sapiens
MNWELLLWLLVLCALLLLLVQLLRFLRADGDLTLLWAEWQGRRPEWELTDMVVWVTGASSGIGEELAYQLSKLGVSLVLSARRVHELERVKRRCLENGNLKEKDILVLPLDLTDTGSHEAATKAVLQEFGRIDILVNNGGMSQRSLCMDTSLDVYRKLIELNYLGTVSLTKCVLPHMIERKQGKIVTVNSILGIISVPLSIGYCASKHALRGFFNGLRTELATYPGIIVSNICPGPVQSNIVENSLAGEVTKTIGNNGDQSHKMTTSRCVRLMLISMANDLKEVWISEQPFLLVTYLWQYMPTWAWWITNKMGKKRIENFKSGVDADSSYFKIFKTKHD

SEQ ID NO: 3794 - protein, 772 aa, Homo sapiens
MAEAHQAVAFQFTVTPDGVDFRLSREALKHVYLSGINSWKKRLIRIKNGILRGVYPGSPTSWLVVIMATVGSSFCNVDISLGLVSCIQRCLPQGCGPYQTPQTRALLSMAIFSTGVWVTGIFFFRQTLKLLLCYHGWMFEMHGKTSNLTRIWAMCIRLLSSRHPMLYSFQTSLPKLPVPRVSATIQRYLESVRPLLDDEEYYRMELLAKEFQDKTAPRLQKYLVLKSWWASNYVSDWWEEYIYLRGRSPLMVNSNYYVMDLVLIKNTDVQAARLGNIIHAMIMYRRKLDREEIKPVMALGIVPMCSYQMERMFNTTRIPGKDTDVLQHLSDSRHVAVYHKGRFFKLWLYEGARLLKPQDLEMQFQRILDDPSPPQPGEEKLAALTAGGRVEWAQARQAFFSSGKNKAALEAIERAAFFVALDEESYSYDPEDEASLSLYGKALLHGNCYNRWFDKSFTLISFKNGQLGLNAEHAWADAPIIGHLWEFVLGTDSFHLGYTETGHCLGKPNPALAPPTRLQWDIPKQCQAVIESSYQVAKALADDVELYCFQFLPFGKGLIKKCRTSPDAFVQIALQLAHFRDRGKFCLTYEASMTRMFREGRTETVRSCTSESTAFVQAMMEGSHTKADLRDLFQKAAKKHQNMYRLAMTGAGIDRHLFCLYLVSKYLGVSSPFLAEVLSEPWRLSTSQIPQSQIRMFDPEQHPNHLGAGGGFGPVADDGYGVSYMIAGENTIFFHISSKFSSSETNAQRFGNHIRKALLDIADLFQVPKAYS

SEQ ID NO: 3795 - protein, 772 aa, Homo sapiens; identical to SEQ ID NO: 3794

SEQ ID NO: 3796 - protein, 772 aa, Homo sapiens; identical to SEQ ID NO: 3794

SEQ ID NO: 3797 - protein, 581 aa, Homo sapiens
MAEAHQAVAFQFTVTPDGVDFRLSREALKHVYLSGINSWKKRLIRIKNGILRGVYPGSPTSWLVVIMATVGSSFCNVDISLGLVSCIQRCLPQGCGPYQTPQTRALLSMAIFSTGVWVTGIFFFRQTLKLLLCYHGWMFEMHGKTSNLTRIWAMCIRLLSSRHPMLYSFQTSLPKLPVPRVSATIQRYLESVRPLLDDEEYYRMELLAKEFQDKTAPRLQKYLVLKSWWASNYVSDWWEEYIYLRGRSPLMVNSNYYVMDLVLIKNTDVQAARLGNIIHAMIMYRRKLDREEIKPVMALGIVPMCSYQMERMFNTTRIPGKDTDVLQHLSDSRHVAVYHKGRFFKLWLYEGARLLKPQDLEMQFQRILDDPSPPQPGEEKLAALTAGGRVEWAQARQAFFSSGKNKAALEAIERAAFFVALDEESYSYDPEDEASLSLYGKALLHGNCYNRWFDKSFTLISFKNGQLGLNAEHAWADAPIIGHLWEFVLGTDSFHLGYTETGHCLGKPNPALAPPTRLQWDIPKQCQAVIESSYQVAKALADDVELYCFQFLPFGKGLIKKCRTSPDAFVQIALQLAHFRG

SEQ ID NO: 3798 - protein, 241 aa, Homo sapiens
MAEEQPQVELFVKAGSDGAKIGNCPFSQRLFMVLWLKGVTFNVTTVDTKRRTETVQKLCPGGQLPFLLYGTEVHTDTNKIEEFLEAVLCPPRYPKLAALNPESNTAGLDIFAKFSAYIKNSNPALNDNLEKGLLKALKVLDNYLTSPLPEEVDETSAEDEGVSQRKFLDGNELTLADCNLLPKLHIVQVVCKKYRGFTIPEAFRGVHRYLSNAYAREEFASTCPDDEEIELAYEQVAKALK

SEQ ID NO: 3799 - protein, 408 aa, Homo sapiens
MAENGDNEKMAALEAKICHQIEYYFGDFNLPRDKFLKEQIKLDEGWVPLEIMIKFNRLNRLTTDFNVIVEALSKSKAELMEISEDKTKIRRSPSKPLPEVTDEYKNDVKNRSVYIKGFPTDATLDDIKEWLEDKGQVLNIQMRRTLHKAFKGSIFVVFDSIESAKKFVETPGQKYKETDLLILFKDDYFAKKNEERKQNKVEAKLRAKQEQEAKQKLEEDAEMKSLEEKIGCLLKFSGDLDDQTCREDLHILFSNHGEIKWIDFVRGAKEGIILFKEKAKEALGKAKDANNGNLQLRNKEVTWEVLEGEVEKEALKKIIEDQQESLNKWKSKGRRFKGKGKGNKAAQPGSGKGKVQFQGKKTKFASDDEHDEHDENGATGPVKRAREETDKEEPASKQQKTENGAGDQ

SEQ ID NO: 3800 - protein, 93 aa, Homo sapiens
MLTELEKALNSIIDVYHKYSLIKGNFHAVYRDDLKKLLETECPQYIRKKGADVWFKELDINTDGAVNFQEFLILVIKMGVAAHKKSHEESHKE

SEQ ID NO: 3801 - protein, 314 aa, Homo sapiens
MQNVINTVKGKALEVAEYLTPVLKESKFKETGVITPEEFVAAGDHLVHHCPTWQWATGEELKVKAYLPTGKQFLVTKNVPCYKRCKQMEYSDELEAIIEEDDGDGGWVDTYHNTGITGITEAVKEITLENKDNIRLQDCSALCEEEEDEDEGEAADMEEYEESGLLETDEATLDTRKIVEACKAKTDAGGEDAILQTRTYDLYITYDKYYQTPRLWLFGYDEQRQPLTVEHMYEDISQDHVKKTVTIENHPHLPPPPMCSVHPCRHAEVMKKIIETVAEGGGELGVHMYLLIFLKFVQAVIPTIEYDYTRHFTM

SEQ ID NO: 3802 - protein, 392 aa, Homo sapiens
MGVNQSVGFPPVTGPHLVGCGDVMEGQNLQGSFFRLFYPCQKAEETMEQPLWIPRYEYCTGLAEYLQFNKRCGGLLFNLAVGSCRLPVSWNGPFKTKDSGYPLIIFSHGLGAFRTLYSAFCMELASRGFVVAVPEHRDRSAATTYFCKQAPEENQPTNESLQEEWIPFRRVEEGEKEFHVRNPQVHQRVSECLRVLKILQEVTAGQTVFNILPGGLDLMTLKGNIDMSRVAVMGHSFGGATAILALAKETQFRCAVALDAWMFPLERDFYPKARGPVFFINTEKFQTMESVNLMKKICAQHEQSRIITVLGSVHRSQTDFAFVTGNLIGKFFSTETRGSLDPYEGQEVMVRAMLAFLQKHLDLKEDYNQWNNLIEGIGPSLTPGAPHHLSSL

SEQ ID NO: 3803 - protein, 593 aa, Homo sapiens
MEQPEDMASLSEFDSLAGSIPATKVEITVSCRNLLDKDMFSKSDPLCVMYTQGMENKQWREFGRTEVIDNTLNPDFVRKFIVDYFFEEKQNLRFDLYDVDSKSPDLSKHDFLGQAFCTLGEIVGSPGSRLEKPLTIGAFSLNSRTGKPMPAVSNGGVPGKKCGTIILSAEELSNCRDVATMQFCANKLDKKDFFGKSDPFLVFYRSNEDGTFTICHKTEVMKNTLNPVWQTFSIPVRALCNGDYDRTIKVEVYDWDRDGSHDFIGEFTTSYRELARGQSQFNIYEVVNPKKKMKKKKYVNSGTVTLLSFAVESECTFLDYIKGGTQINFTVAIDFTASNGNPSQSTSLHYMSPYQLNAYALALTAVGEIIQHYDSDKMFPALGFGAKLPPDGRVSHEFPLNGNQENPSCCGIDGILEAYHRSLRTVQLYGPTNFAPVVTHVARNAAAVQDGSQYSVLLIITDGVISDMAQTKEAIVNAAKLPMSIIIVGVGQAEFDAMVELDGDDVRISSRGKLAERDIVQFVPFRDYVDRTGNHVLSMARLARDVLAEIPDQLVSYMKAQGIRPRPPPAAPTHSPSQSPARTPPASPLHTHI

SEQ ID NO: 3804 - protein, 1012 aa, Homo sapiens
MRWGLRPRGPGAAALATARSLWGTPRLPCSPGWQGATKRLLVRSVSGASNHQPNSNSGRYRDTVLLPQTSFPMKLLGRQQPDTELEIQQKCGFSELYSWQRERKVKTEFCLHDGPPYANGDPHVGHALNKILKDIANRFHMMNGSKIHFVPGWDCHGLPIEIKVLSELGREAQNLSAMEIRKKARSFAKAAIEKQKSAFIRWGIMADWNNCYYTFDGKYEAKQLRTFYQMYDKGLVYRSYKPVFWSPSSRTALAEAELEYNPEHVSRSIYVKFPLLKPSPKLASLIDGSSPVSILVWTTQPWTIPANEAVCYMPESKYAVVKCSKSGDLYVLAADKVASVASTLETTFETISTLSGVDLENGTCSHPLIPDKASPLLPANHVTMAKGTGLVHTAPAHGMEDYGVASQHNLPMDCLVDEDGVFTDVAGPELQNKAVLEEGTDVVIKMLQTAKNLLKEEKLVHSYPYDWRTKKPVVIRASKQWFINITDIKTAAKELLKKVKFIPGSALNGMVEMMDRRPYWCISRQRVWGVPIPVFHHKTKDEYLINSQTTEHIVKLVEQHGSDIWWTLPPEQLLPKEVLSEVGGPDALEYVPGQDILDIWFDSGTSWSYVLPGPDQRADLYLEGKDQLGGWFQSSLLTSVAARKRAPYKTVIVHGFTLGEKGEKMSKSLGNVIHPDVVVNGGQDQSKEPPYGADVLRWWVADSNVFTEVAIGPSVLNAARDDISKLRNTLRFLLGNVADFNPETDSIPVNDMYVIDQYMLHLLQDLANKITELYKQYDFGKVVRLLRTFYTRELSNFYFSIIKDRLYCEKENDPKRRSCQTALVEILDVIVRSFAPILPHLAEEVFQHIPYIKEPKSVFRTGWISTSSIWKKPGLEEAVESACAMRDSFLGSIPGKNAAEYKVITVIEPGLLFEIIEMLQSEETSSTSQLNELMMASESTLLAQEPREMTADVIELKGKFLINLEGGDIREESSYKVIVMPTTKEKCPRCWKYTAESSDTLCPRCAEVVSGK

SEQ ID NO: 3805 - protein, 3117 aa, Homo sapiens
MRSSKSKEVPLPNPRNSQSKDTVQADITTSWDALSQTKAALRHIENKLEVAPTSTAVCDSVMDTKKSSTSATRKISRKDGRYLDDSWVNAPISKSTKSRKEKSRSPLRATTLEGNVKKNNRVEFREPLVSYREIHGAPSNFSSSHLESKHVYCVDVNEEKTESGNWMIGSREERNIRSCDFESSQSSVINDTVVRFLNDRPAIDALQNSECLIRMGASMRTEEEMPNRTKGSENNLKLSVNNMAHDTDPKALRLTDSSPSSTSTSNSQRLDILKRRQHDVKLEKLKERIRKQWEHSEETNGRGQKLGHIDHPVMVVNVDNSVTAKVRKVATAPPAPAYKGFNPSETKIRTPDGKVWQEAEFQNMSRELYRDLALHFADDISIKEKPAEKSKEKKVVKPVRKVQKVAQLSSTECRTGSSHLISTSSWRDGQKLVKKILGPAPRMEPKEQRTASSDRGGRRRTAKSGGHIGRAESDPRLDVLHRHLQRNSERSRSKSRSENNIKKLASSLPDNKQEENTALNKDFLPIEIRGILDDLQLDSTAHTAKQDTVELQNQKSSAPVHAPRSHSPVKRKPDKITANEDPPVISKRRHYDTDEVRQYIVRQQEERKRKQNEEKKAQKEATEQKNKRLQELYRKQKEAFTKVKNVPPSEPSATRRLQETYSKLLLEKTLLEEPSHQHVTQETQAKPGYQPSGESDKENKVQERPPSASSSSDMSLSEPPQPLARKDLMESTWMQPERLSPQVHHSQPQPFAGTAGSLLSHLLSLEHVGILHKDFESILPTRKNHNMASRPLTFTPQPYVTSPAAYTDALLKPSASQYKSKLDRIEALKATAASLSSRIESEAKKLAGASINYGSAWNTEYDVQQAPQEDGPWTKAVTPPVKDDNEDVFSARIQKMLGSCVSHATFDDDLPGVGNLSEFKKLPEMIRPQSAISSFRVRSPGPKPQGLLAQLCKRQTDSSSSDMQACSQDKAKISLGSSIDSVSEGPLLSEGSLSEEEGDQDGQPLLKVAEILKEKEFCPGERNSYEPIKEFQKEAEKFLPLFGHIGGTQSKGPWEELAKGSPHSVINIFTKSYQLYGKGFEDKLDRGTSTSRPLNATATPLSGVSYEDDFVSSPGTGTSTEKKSTLEPHSTLSPQEDHSNRKSAYDPSSVDVTSQHSSGAQSAASSRSSTSSKGKKGKKEKTEWLDSFTGNVQNSLLDEEKAERGSHQGKKSGTSSKLSVKDFEQTLDTDSTLEDLSGHSVSVSSDKGRSQKTPTSPLSPSSQKSLQFDVAGTSSERSKSSVMPPTITGFKPNAPLTDLNPAASRTTTENMAPIPGSKRFSPAGLHHRMAAELSYLNAIEESVRQLSDVERVRGISLAQQESVSLAQIIKAQQQRHERDLALLKLKAEQEALESQRQLEETRNKAAQVHAESLQQVVQSQREVTEVLQEATCKIAAQQSETARLTTDAARQICEMAELTRTHISDAVVASGAPLAILYDHQRQHLPDFVKQLRTRTETDRKSPSVSLSQSKEGTLDSKHQKYSASYDSYSESSGYKNHDRRSSSGSSRQESPSVPSCKENEKKLNGEKIESSIDEQVQTAADDSLRSDSVPSLPDEKDSTSIATEYSLKFDESMTEDEIEEQSFRSLLPSESHRRFNMEKRRGHHDDSDEEASPEKTTLSTAKELNMPFSGGQDSFSKFTMEMVRQYMKEEEMRAAHQSSLLRLREKALKEKTKAELAWLEHQKKHLRDKGEDDKMPPLRKKQRGLLLRLQQEKAEIKRLQEANKAARKERQLILKQQEEIEKIRQTTIKLQEKLKSAGESKLDSHSDDDTKDNKATSPGPTDLETRSPSPISISSSETSSIMQKLKKMRSRMDEKFLTKREQKLMQRRQHAEELLEWKRRLDAEEAEIRQMEKQALAAWDKELIKPKTPKKELEDQRTEQKEIASEEESPVPLYSHLNSESSIPEELGSPAVEYVPSESIGQEQPGSPDHSILTEEMICSQELESSTSPSKHSLPKSCTSVSKQESSKGSHRTGGQCHLPIKSHQHCYSWSDESLSMTQSETTSDQSDIEGRIRALKDELRKRKSVVNQLKKEQKKRQKERLKAQEASLIKQLESYDEFIKKTEAELSQDLETSPTAKPQIKTLSSASEKPKIKPLTPLHRSETAKNWKSLTESERSRGSLEPIAEHVDASLSGSERSVSERSLSAYAKRVNEWDSRTEDFQTPSPVLRSSRKIREESGDSLENVPALHLLKELNATSRILDMSDGKVGESSKKSEIKEIEYTKLKKSKIEDAFSKEGKSDVLLKLVLEQGDSSEILSKKDLPLDSENVQKDLVGLAIENLHKSEEMLKERQSDQDMNHSPNIQSGKDIHEQKNTKEKDLSWSEHLFAPKEIPYSEDFEVSSFKKEISAELYKDDFEVSSLLSLRKDSQSCRDKPQPMRSSTSGATSFGSNEEISECLSEKSLSIHSNVHSDRLLELKSPTELMKSKERSDVEHEQQVTESPSLASVPTADELFDFHIGDRVLIGNVQPGILRFKGETSFAKGFWAGVELDKPEGNNNGTYDGIAYFECKEKHGIFAPPQKISHIPENFDDYVDINEDEDCYSDERYQCYNQEQNDTEGPKDREKDVSEYFYEKSLPSVNDIEASVNRSRSLKIETDNVQDISGVLEAHVHQQSSVDSQISSKENKDLISDATEKVSIAAEDDTLDNTFSEELEKQQQFTEEEDNLYAEASEKLCTPLLDLLTREKNQLEAQLKSSLNEEKKSKQQLEKISLLTDSLLKVFVKDTVNQLQQIKKTRDEKIQLSNQELLGDDQKKVTPQDLSQNVEEQSPSISGCFLSSELEDEKEEISSPDMCPRPESPVFGASGQEELAKRLAELELSREFLSALGDDQDWFDEDFGLSSSHKIQKNKAEETIVPLMAEPKRVTQQPCETLLAVPHTAEEVEILVHNAAEELWKWKELGHDLHSISIPTKLLGCASKGLDIESTSKRVYKQAVFDLTKEIFEEIFAEDPNLNQPVWMKPCRINSSYFRRVKNPNNLDEIKSFIASEVLKLFSLKKEPNHKTDWQKMMKFGRKKRDRVDHILVQELHEEEAQWVNYDEDELCVKMQLADGIFETLIKDTIDVLNQISEKQGRMLLV

SEQ ID NO: 3806 - protein, 142 aa, Homo sapiens
MAVAAVKWVMSKRTILKHLFPVQNGALYCVCHKSTYSPLPDDYNCNVELALTSDGRTIVCYHPSVDIPYEHTKPIPRPDPVHNNEETHDQVLKTRLEEKVEHLEEGPMIEQLSKMFFTTKHRWYPHGRYHRCRKNLNPPKDR

SEQ ID NO: 3807 - protein, 142 aa, Homo sapiens; identical to SEQ ID NO: 3806

SEQ ID NO: 3808 - protein, 142 aa, Homo sapiens
MGDVKENYLETFISSPKFGRTCADGALYCVCHKSTYSPLPDDYNCNVELALTSDGRTIVCYHPSVDIPYEHTKPIPRPDPVHNNEETHDQVLKTRLEEKVEHLEEGPMIEQLSKMFFTTKHRWYPHGRYHRCRKNLNPPKDR

SEQ ID NO: 3809 - protein, 297 aa, Homo sapiens
MAKVSELYDVTWEEMRDKMRKWREENSRNSEQIVEVGEELINEYASKLGDDIWIIYEQVMIAALDYGRDDLALFCLQELRRQFPGSHRVKRLTGMRFEAMERYDDAIQLYDRILQEDPTNTAARKRKIAIRKAQGKNVEAIRELNEYLEQFVGDQEAWHELAELYINEHDYAKAAFCLEELMMTNPHNHLYCQQYAEVKYTQGGLENLELSRKYFAQALKLNNRNMRALFGLYMSASHIASNPKASAKTKKDNMKYASWAASQINRAYQFAGRSKKETKYSLKAVEDMLETLQITQS

SEQ ID NO: 3810 - protein, 1127 aa, Homo sapiens
MPMFLTVYLSNNEQHFTEVPVTPETICRDVVDLCKEPGESDCHLAEVWCGSERPVADNERMFDVLQRFGSQRNEVRFFLRHERPPGRDIVSGPRSQDPSLKRNGVKVPGEYRRKENGVNSPRMDLTLAELQEMASRQQQQIEAQQQLLATKEQRLKFLKQQDQRQQQQVAEQEKLKRLKEIAENQEAKLKKVRALKGHVEQKRLSNGKLVEEIEQMNNLFQQKQRELVLAVSKVEELTRQLEMLKNGRIDSHHDNQSAVAELDRLYKELQLRNKLNQEQNAKLQQQRECLNKRNSEVAVMDKRVNELRDRLWKKKAALQQKENLPVSSDGNLPQQAASAPSRVAAVGPYIQSSTMPRMPSRPELLVKPALPDGSLVIQASEGPMKIQTLPNMRSGAASQTKGSKIHPVGPDWSPSNADLFPSQGSASVPQSTGNALDQVDDGEVPLREKEKKVRPFSMFDAVDQSNAPPSFGTLRKNQSSEDILRDAQVANKNVAKVPPPVPTKPKQINLPYFGQTNQPPSDIKPDGSSQQLSTVVPSMGTKPKPAGQQPRVLLSPSIPSVGQDQTLSPGSKQESPPAAAVRPFTPQPSKDTLLPPFRKPQTVAASSIYSMYTQQQAPGKNFQQAVQSALTKTHTRGPHFSSVYGKPVIAAAQNQQQHPENIYSNSQGKPGSPEPETEPVSSVQENHENERIPRPLSPTKLLPFLSNPYRNQSDADLEALRKKLSNAPRPLKKRSSITEPEGPNGPNIQKLLYQRTTIAAMETISVPSYPSKSASVTASSESPVEIQNPYLHVEPEKEVVSLVPESLSPEDVGNASTENSDMPAPSPGLDYEPEGVPDNSPNLQNNPEEPNPEAPHVLDVYLEEYPPYPPPPYPSGEPEGPGEDSVSMRPPEITGQVSLPPGKRTNLRKTGSERIAHGMRVKFNPLALLLDSSLEGEFDLVQRIIYEVDDPSLPNDEGITALHNAVCAGHTEIVKFLVQFGVNVNAADSDGWTPLHCAASCNNVQVCKFLVESGAAVFAMTYSDMQTAADKCEEMEEGYTQCSQFLYGVQEKMGIMNKGVIYALWDYEPQNDDELPMKEGDCMTIIHREDEDEIEWWWARLNDKEGYVPRNLLGLYPRIKPRQRSLA

SEQ ID NO: 3811 - protein, 1005 aa, Homo sapiens
MDLTLAELQEMASRQQQQIEAQQQLLATKEQRLKFLKQQDQRQQQQVAEQEKLKRLKEIAENQEAKLKKVRALKGHVEQKRLSNGKLVEEIEQMNNLFQQKQRELVLAVSKVEELTRQLEMLKNGRIDSHHDNQSAVAELDRLYKELQLRNKLNQEQNAKLQQQRECLNKRNSEVAVMDKRVNELRDRLWKKKAALQQKENLPVSSDGNLPQQAASAPSRVAAVGPYIQSSTMPRMPSRPELLVKPALPDGSLVIQASEGPMKIQTLPNMRSGAASQTKGSKIHPVGPDWSPSNADLFPSQGSASVPQSTGNALDQVDDGEVPLREKEKKVRPFSMFDAVDQSNAPPSFGTLRKNQSSEDILRDAQVANKNVAKVPPPVPTKPKQINLPYFGQTNQPPSDIKPDGSSQQLSTVVPSMGTKPKPAGQQPRVLLSPSIPSVGQDQTLSPGSKQESPPAAAVRPFTPQPSKDTLLPPFRKPQTVAASSIYSMYTQQQAPGKNFQQAVQSALTKTHTRGPHFSSVYGKPVIAAAQNQQQHPENIYSNSQGKPGSPEPETEPVSSVQENHENERIPRPLSPTKLLPFLSNPYRNQSDADLEALRKKLSNAPRPLKKRSSITEPEGPNGPNIQKLLYQRTTIAAMETISVPSYPSKSASVTASSESPVEIQNPYLHVEPEKEVVSLVPESLSPEDVGNASTENSDMPAPSPGLDYEPEGVPDNSPNLQNNPEEPNPEAPHVLDVYLEEYPPYPPPPYPSGEPEGPGEDSVSMRPPEITGQVSLPPGKRTNLRKTGSERIAHGMRVKFNPLALLLDSSLEGEFDLVQRIIYEVDDPSLPNDEGITALHNAVCAGHTEIVKFLVQFGVNVNAADSDGWTPLHCAASCNNVQVCKFLVESGAAVFAMTYSDMQTAADKCEEMEEGYTQCSQFLYGVQEKMGIMNKGVIYALWDYEPQNDDELPMKEGDCMTIIHREDEDEIEWWWARLNDKEGYVPRNLLGLYPRIKPRQRSLA

SEQ ID NO: 3812 - protein, 480 aa, Homo sapiens
MATVPGLQPLPTLEQDLEQEEILIVKVEEDFCLEEEPSVETEDPSPETFRQLFRLFCYQEVAGPREALSRLWELCCRWLRPELRTKEQILELLVLEQFLTVLPGEIQARVREQQPESGEEAVVLVEGLQRKPRKHRQRGSELLSDDEVPLGIGGQFLKHQAEAQPEDLSLEEEARFSSQQPPAQLSHRPQRGPLLWPERGPPAPRHQEMASASPFLSAWSQVPVNLEDVAVYLSGEEPRCMDPAQRDAPLENEGPGIQLEDGGDGREDAPLRMEWYRVLSARCQGPGHPLPGQRPAPVRGLVRPDQPRGGPPPGRRASHGADKPYTCPECGKGFSKTSHLTKHQRTHTGERPYKCLVCGKGFSDRSNFSTHQRVHTGEKPYPCPECGKRFSQSSSLVIHRRTHSGERPYACTQCGKRFNNSSHFSAHRRTHTGEKPYTCPACGRGFRRGTDLHKHQRTHMGAGSLPTLQPVAPGGPGAKA

SEQ ID NO: 3813 - protein, 422 aa, Homo sapiens
MGQAGCKGLCLSLFDYKTEKYVIAKNKKVGLLYRLLQASILAYLVVWVFLIKKGYQDVDTSLQSAVITKVKGVAFTNTSDLGQRIWDVADYVIPAQGENVFFVVTNLIVTPNQRQNVCAENEGIPDGACSKDSDCHAGEAVTAGNGVKTGRCLRRENLARGTCEIFAWCPLETSSRPEEPFLKEAEDFTIFIKNHIRFPKFNFSKSNVMDVKDRSFLKSCHFGPKNHYCPIFRLGSVIRWAGSDFQDIALEGGVIGINIEWNCDLDKAASECHPHYSFSRLDNKLSKSVSSGYNFRFARYYRDAAGVEFRTLMKAYGIRFDVMVNGKGAFFCDLVLIYLIKKREFYRDKKYEEVRGLEDSSQEAEDEASGLGLSEQLTSGPGLLGMPEQQELQEPPEAKRGSSSQKGNGSVCPQLLEPHRST

SEQ ID NO: 3814 - protein, 397 aa, Homo sapiens
MGQAGCKGLCLSLFDYKTEKYVIAKNKKVGLLYRLLQASILAYLVVWVFLIKKGYQDVDTSLQSAVITKVKGVAFTNTSDLGQRIWDVADYVIPAQNEGIPDGACSKDSDCHAGEAVTAGNGVKTGRCLRRENLARGTCEIFAWCPLETSSRPEEPFLKEAEDFTIFIKNHIRFPKFNFSNNVMDVKDRSFLKSCHFGPKNHYCPIFRLGSVIRWAGSDFQDIALEGGVIGINIEWNCDLDKAASECHPHYSFSRLDNKLSKSVSSGYNFRFARYYRDAAGVEFRTLMKAYGIRFDVMVNGKGAFFCDLVLIYLIKKREFYRDKKYEEVRGLEDSSQEAEDEASGLGLSEQLTSGPGLLGMPEQQELQEPPEAKRGSSSQKGNGSVCPQLLEPHRST

SEQ ID NO: 3815 - protein, 178 aa, Homo sapiens
MGQAGCKGLCLSLFDYKTEKYVIAKNKKVGLLYRLLQASILAYLVVWVFLIKKGYQDVDTSLQSAVITKVKGVAFTNTSDLGQRIWDVADYVIPAQGENVFFVVTNLIVTPNQRQNVCAENEGIPDGACSKDSDCHAGEAVTAGNGVKTGRCLRRENLARGTCEIFAWCPLETSSRPE

SEQ ID NO: 3816 - protein, 895 aa, Homo sapiens
MTAWTMGARGLDKRGSFFKLIDTIASEIGELKQEMVRTDVNLENGLEPAETHSMVRHKDGGYSEEEDVKTCARDSGYDSLSNRLSILDRLLHTHPIWLQLSLSEEEAAEVLQAQPPGIFLVHKSTKMQKKVLSLRLPCEFGAPLKEFAIKESTYTFSLEGSGISFADLFRLIAFYCISRDVLPFTLKLPYAISTAKSEAQLEELAQMGLNFWSSPADSKPPNLPPPHRPLSSDGVCPASLRQLCLINGVHSIKTRTPSELECSQTNGALCFINPLFLKVHSQDLSGGLKRPSTRTPNANGTERTRSPPPRPPPPAINSLHTSPRLARTETQTSMPETVNHNKHGNVALPGTKPTPIPPPRLKKQASFLEAEGGAKTLSGGRPGAGPELELGTAGSPGGAPPEAAPGDCTRAPPPSSESRPPCHGGRQRLSDMSISTSSSDSLEFDRSMPLFGYEADTNSSLEDYEGESDQETMAPPIKSKKKRSSSFVLPKLVKSQLQKVSGVFSSFMTPEKRMVRRIAELSRDKCTYFGCLVQDYVSFLQENKECHVSSTDMLQTIRQFMTQVKNYLSQSSELDPPIESLIPEDQIDVVLEKAMHKCILKPLKGHVEAMLKDFHMADGSWKQLKENLQLVRQRNPQELGVFAPTPDFVDVEKIKVKFMTMQKMYSPEKKVMLLLRVCKLIYTVMENNSGRMYGADDFLPVLTYVIAQCDMLELDTEIEYMMELLDPSLLHGEGGYYLTSAYGALSLIKNFQEEQAARLLSSETRDTLRQWHKRRTTNRTIPSVDDFQNYLRVAFQEVNSGCTGKTLLVRPYITTEDVCQICAEKFKVGDPEEYSLFLFVDETWQQLAEDTYPQKIKAELHSRPQPHIFHFVYKRIKNDPYGIIFQNGEEDLTTS

SEQ ID NO: 3817 - protein, 562 aa, Homo sapiens
MLACLPGPGDLSFQPLSHTQMNTGLQKWDTTQKMRTAHYPTPAELDAYAKKVANNPLTIKIFPNSVKVPQRKHVRRTVNGLDTSAQRYSPYPTQAATKAGLLAIVKVPAKSILKDFDGTRARLLPEAIMNPPVAPYATVAPSTLAHPQAQALARQQALQHAQTLAHAPPQTLQHPQGIPPPQALSHPQSLQQPQGLGHPQPMAQTQGLVHPQALAHQGLQHPHNPLLHGGRKMPDSDAPPNVTVSTSTIPLSMAATLQHSRPPDLSSIVHQINQFCQTRAGISTTSVCEGQIANPSPISRSLLINASTRVSTHSVPTPMPSCVVNPMEHTHAATAALPAAGPVNLPTGISRVPTGYPSDLKPVTWNQHQLAHLQQMCSEASGTPAPGLTGKHAAGRELAGPGFVGKAPAYPQELCLAQSFHLKPPLEKPTPSPPVNGMAAPLAYPNGHYFQPLWNNILPTPNSDSSGSQDLAMPFHGGQPTGAPLDCAAAPGAHYRAGTGGGPVASQNSLMQTVDYLSGDFQQACFREQSLAMLSKAHRAPGNRAPDPTESRSLHILHPGYR

SEQ ID NO: 3818 - protein, 102 aa, Homo sapiens
MADDVDQQQTTNTVEEPLDLIRLSLDERIYVKMRNDRELRGRLHAYDQHLNMILGDVEETVTTIEIDEETYEEIYKSTKRNIPMLFVRGDGVVLVAPPLRVG

SEQ ID NO: 3819 - protein, 69 aa, Homo sapiens
MVPPVQVSPLIKLGRYSALFLGVAYGATRYNYLKPRAEEERRIAAEEKKKQDELKRIARELAEDDSILK

SEQ ID NO: 3820 - protein, 336 aa, Homo sapiens
MSQAVQTNGTQPLSKTWELSLYELQRTPQEAITDGLEIVVSPRSLHSELMCPICLDMLKNTMTTKECLHRFCADCIITALRSGNKECPTCRKKLVSKRSLRPDPNFDALISKIYPSRDEYEAHQERVLARINKHNNQQALSHSIEEGLKIQAMNRLQRGKKQQIENGSGAEDNGDSSHCSNASTHSNQEAGPSNKRTKTSDDSGLELDNNNAAMAIDPVMDGASEIELVFRPHPTLMEKDDSAQTRYIKTSGNATVDHLSKYLAVRLALEELRSKGESNQMNLDTASEKQYTIYIATASGQFTVLNGSFSLELVSEKYWKVNKPMELYYAPTKEHK

SEQ ID NO: 3821 - protein, 389 aa, Homo sapiens
MPLENLEEEGLPKNPDLRIAQLRFLLSLPEHRGDAAVRDELMAAVRDNNMAPYYEALCKSLDWQIDVDLLNKMKKANEDELKRLDEELEDAEKNLGESEIRDAMMAKAEYLCRIGDKEGALTAFRKTYDKTVALGHRLDIVFYLLRIGLFYMDNDLITRNTEKAKSLIEEGGDWDRRNRLKVYQGLYCVAIRDFKQAAELFLDTVSTFTSYELMDYKTFVTYTVYVSMIALERPDLREKVIKGAEILEVLHSLPAVRQYLFSLYECRYSVFFQSLAVVEQEMKKDWLFAPHYRYYVREMRIHAYSQLLESYRSLTLGYMAEAFGVGVEFIDQELSRFIAAGRLHCKIDKVNEIVETNRPDSKNWQYQETIKKGDLLLNRVQKLSRVINM

SEQ ID NO: 3822 - protein, 1995 aa, Homo sapiens
MADYALLEDCPYVDDCVFAAEFMTDDYVRVTQLYCDGVGKQYKDYVQSERNLEFDICSIWCSKPISVLQDYCDAIKINIFWPLLFQHQNSSVISRLHPCVDANNSRASEINLKRLQHLELMEDIVDLAKKAANDSLLIGGLLRIGYKIENKILAMEEALNWIKYAGDVTILTKLGSIDNCWPMLSIFFTEYKYHITKIVMEDCNLLEELKTQSCMDCIEQGELMKMKGNEEFSKERFDIAIIYYTRAIEYRPENHLLYGNRALCFLRTGQFRNALGDGKRATILKNTWPKGHYRYCDALSMLGEYNWALQANITAQKLCKNDPEGIKDLIQQHVKLQKQIEDLQGRTANKNPIKAFYENRAYTPRSLSAPVFSTSLNFVEKERDFRKINHEMANGGNQNLKVMDEALMVDDCDCHPEFSPPSSQPPKHKGKQKSRNNESEKFSSSSQLTLPADLKNILEKQFSKSSRGAHQDFANIMTMLRSLIQDGYTALLEQRCRSAAHAFTELLNGLDPQKIKQLNLAMINYVLVVYGLAISLLGIGQPEELSEAENQFKRIIEHYHNEGLDCLAYCGIGKVYLKKNRFLEALNHFEKARTLIYRLPGVLTWPTSNVIIEESQPEKIKMLLEKFVEECKFPPVPDAICCYQKCCGYSKIQIYITDPDFKGFIRISCCQYCKIEFHMNCWKKLKTTTFNDKIDKDFLQGICLTPDCEGVISKIIIFSSGGQVKCEFEHKVIKEKVPPRPILKQKCSSLEKLRLKEDKKLKRKIQKKEAKKLAQERMEEDLRESNPPKNEEQKETVDNVQHCQFLDDRILQCIKQYADKIKSGIWNTATLLKELLSWKVLSTEDYTTCFSSRNFLNEAVDYVIRHLIQEKNRVKTRIFLHVLSELKEVEPKLAAWIRKLNSFGLDATGPFFSRYEASLKQLDFSIMTFLWNEKYGHKLDSIEGKQLDYFFEPTSSKEARCLIWLLEEHRDKFPALHSALDEFFDIMDSRCTVLRKQDSGEAPFSSTKVKNKGKKKKPKDSKPMLVGSGTTSVTPNNEIITSSEDHSNQNSDTAGPFAVPDHLRQDVEEFEALYDQHSNEYVVRNKKLWDMNPKQKCSTLYDYFSQLLEEHGPLDMSHKMFSEEYEFFPEETRPILEKAGGLKSFLLGCPRFVVIDNCIALKKVASRLKKKRKKKNIKTKVEDISKAGEYLQVKLPLNSAAREFKPDVKSKPVSGSSSAPASEDVKPKPLSANSPKPACEDVKAKPVSDNSSRQVSEDGKPKGFSSNSPKPGSEDANYKRVSSNSPKPVLEDVKPTYWAQSHLVTGYCTYLPFQRFDNTRTSPAYINVLPGLPQYTSIYTPLVSLSPEYQLPRSVPVVPSFVANDRADKNATAYFEGHHLNAENAAGHQIASETQILEDSSLISVKSQCSTGDAHTVLSESNRKDGHCGNSNNKCEVIPESTSAVTNIPQVQMVAIQVSWNITHQEVNTEPYNPFEKQQGEISRIEKEYQVLQDQLKEAYENYEQIKLKGLEETRDLEEKLKRHLEENKISKTELDWLLQDLEREIKKWQEEKKEIQKTLKSLKKKIKKVSNANEMYTQKNDGNDKEHELHLDQSLEISNTLTNEKMKIEECIKKGKKDYEESHQRAVAAEVSVLENWKESEVYKLQIMQSQAEAYLKKLELISHDPAAYPDMESDICSWELFLSNVTKETEKAKYQFEEQIKAIKNGSRLSELSKVQISELSFPACNTVHPELLPESSGHDDQGFMTSASDVTGNQAALHRDPSVFSAGDSPGEAPSALLPGPPPSQPEATQLPGPKGAGQAALSEQSPAADQKQPVPPGCAACSSQSPKKPFNSIIEHLSVVFPCYNSTELAGFIKKVRSKNKNSLSGLSIDEIVQRVTEHILDEQKKKKPNPGKDKRTYEPSSAAHVTRSSQGPPLAVVAPSPKTKGQKAEDVPVRVALGASSCEICHEVFKSKNVRVLKCGHKYHKGCFKQWLKGQSACPACQTCDLLSEE

SEQ ID NO: 3823 - protein, 545 aa, Homo sapiens
MKGVRAAIGAESWKRLKETARFKVGENWRQELRVIYQCFVWCGTPETRKSKAKSCICHVCGTHLNRLHSCLSCVFFGCFTEKHIHEHAETKQHNLAVDLYYGGIYCFMCKDYVYDKDIEQIAKEEQGEALKLQASTSTEVSHQQCSVPGLGEKFPTWETTKPELELLGHNPRRRRITSSFTIGLRGLINLGNTCFMNCIVQALTHTPILRDFFLSDRHRCEMPSPELCLVCEMSSLFRELYSGNPSPHVPYKLLHLVWIHARHLAGYRQQDAHEFLIAALDVLHRHCKGDDVGKAANNPNHCNCIIDQIFTGGLQSDVTCQACHGVSTTIDPCWDISLDLPGSCTSFWPMSPGRESSVNGESHIPGITTLTDCLRRFTRPEHLGSSAKIKCGSCQSYQESTKQLTMNKLPVVACFHFKRFEHSAKQRRKITTYISFPLELDMTPFMASSKESRMNGQLQLPTNSGNNENKYSLFAVVNHQGTLESGHYTSFIRHHKDQWFKCDDAVITKASIKDVLDSEGYLLFYHKQVLEHESEKVKEMNTQAY

SEQ ID NO: 3824 - protein, 545 aa, Homo sapiens; identical to SEQ ID NO: 3823

SEQ ID NO: 3825 - protein, 441 aa, Homo sapiens
MEQPQEEAPEVREEEEKEEVAEAEGAPELNGGPQHALPSSSYTDLSRSSSPPSLLDQLQMGCDGASCGSLNMECRVCGDKASGFHYGVHACEGCKGFFRRTIRMKLEYEKCERSCKIQKKNRNKCQYCRFQKCLALGMSHNAIRFGRMPEAEKRKLVAGLTANEGSQYNPQVADLKAFSKHIYNAYLKNFNMTKKKARSILTGKASHTAPFVIHDIETLWQAEKGLVWKQLVNGLPPYKEISVHVFYRCQCTTVETVRELTEFAKSIPSFSSLFLNDQVTLLKYGVHEAIFAMLASIVNKDGLLVANGSGFVTREFLRSLRKPFSDIIEPKFEFAVKFNALELDDSDLALFIAAIILCGDRPGLMNVPRVEAIQDTILRALEFHLQANHPDAQYLFPKLLQKMADLRQLVTEHAQMMQRIKKTETETSLHPLLQEIYKDMY

SEQ ID NO: 3826 - protein, 902 aa, Homo sapiens
MSEFRIHHDVNELLSLLRVHGGDGAEVYIDLLQKNRTPYVTTTVSAHSAKVKIAEFSRTPEDFLKKYDELKSKNTRNLDPLVYLLSKLTEDKETLQYLQQNAKERAELAAAAVGSSTTSINVPAAASKISMQELEELRKQLGSVATGSTLQQSLELKRKMLRDKQNKKNSGQHLPIFPAWVYERPALIGDFLIGAGISTDTALPIGTLPLASQESAVVEDLLYVLVGVDGRYVSAQPLAGRQSRTFLVDPNLDLSIRELVHRILPVAASYSAVTRFIEEKSSFEYGQVNHALAAAMRTLVKEHLILVSQLEQLHRQGLLSLQKLWFYIQPAMRTMDILASLATSVDKGECLGGSTLSLLHDRSFSYTGDSQAQELCLYLTKAASAPYFEVLEKWIYRGIIHDPYSEFMVEEHELRKERIQEDYNDKYWDQRYTIVQQQIPSFLQKMADKILSTGKYLNVVRECGHDVTCPVAKEIIYTLKERAYVEQIEKAFNYASKVLLDFLMEEKELVAHLRSIKRYFLMDQGDFFVHFMDLAEEELRKPVEDITPPRLEALLELALRMSTANTDPFKDDLKIDLMPHDLITQLLRVLAIETKQEKAMAHADPTELALSGLEAFSFDYIVKWPLSLIINRKALTRYQMLFRHMFYCKHVERQLCSVWISNKTAKQHSLHSAQWFAGAFTLRQRMLNFVQNIQYYMMFEVMEPTWHILEKNLKSASNIDDVLGHHTGFLDTCLKDCMLTNPELLKVFSKLMSVCVMFTNCMQKFTQSMKLDGELGGQTLEHSTVLGLPAGAEERARKELARKHLAEHADTVQLVSGFEATINKFDKNFSAHLLDLLARLSIYSTSDCEHGMASVISRLDFNGFYTERLERLSAERSQKATPQVPVLRGPPAPAPRVAVTAQ

SEQ ID NO: 3827 - protein, 301 aa, Homo sapiens
MPGISSQILTNAQGQVIGTLPWVVNSASVAAPAPAQSLQVQAVTPQLLLNAQGQVIATLASSPLPPPVAVRKPSTPESPAKSEVQPIQPTPTVPQPAVVIASPAPAAKPSASAPIPITCSETPTVSQLVSKPHTPSLDEDGINLEEIREFAKNFKIRRLSLGLTQTQVGQALTATEGPVYSQSAICRFEKLDITPKSAQKLKPVLEKWLNEAELRNQEGQQNLMEFVGGEPSKKRKRRTSFTPQAIEALNAYFEKNPLPTGQEITEIAKELNYDREVVRVWFCNRRQTLKNTSKLNVFQIP

SEQ ID NO: 3828 - protein, 642 aa, Homo sapiens
MKRSSVSSGGAGRLSMQELRSQDVNKQGLYTPQTKEKPTFGKLSINKPTSERKVSLFGKRTSGHGSRNSQLGIFSSSEKIKDPRPLNDKAFIQQCIRQLCEFLTENGYAHNVSMKSLQAPSVKDFLKIFTFLYGFLCPSYELPDTKFEEEVPRIFKDLGYPFALSKSSMYTVGAPHTWPHIVAALVWLIDCIKIHTAMKESSPLFDDGQPWGEETEDGIMHNKLFLDYTIKCYESFMSGADSFDEMNAELQSKLKDLFNVDAFKLESLEAKNRALNEQIARLEQEREKEPNRLESLRKLKASLQGDVQKYQAYMSNLESHSAILDQKLNGLNEEIARVELECETIKQENTRLQNIIDNQKYSVADIERINHERNELQQTINKLTKDLEAEQQKLWNEELKYARGKEAIETQLAEYHKLARKLKLIPKGAENSKGYDFEIKFNPEAGANCLVKYRAQVYVPLKELLNETEEEINKALNKKMGLEDTLEQLNAMITESKRSVRTLKEEVQKLDDLYQQKIKEAEEEDEKCASELESLEKHKHLLESTVNQGLSEAMNELDAVQREYQLVVQTTTEERRKVGNNLQRLLEMVATHVGSVEKHLEEQIAKVDREYEECMSEDLSENIKEIRDKYEKKATLIKSSEE

SEQ ID NO: 3829 - protein, 496 aa, Homo sapiens [sequence omitted]

SEQ ID NO: 3830 - protein, 496 aa, Homo sapiens [sequence omitted]

SEQ ID NO: 3831 - protein, 807 aa, Homo sapiens
MFSAGAESLLHQAREIQDEELKKFCSRICKLLQAEDLGPDTLDSLQRLFLIISATKYSRRLEKTCVDLLQATLGLPACPEQLQVLCAAILREMSPSDSLSLAWDHTQNSRQLSLVASVLLAQGDRNEEVRAVGQGVLRALESRQPEGPSLRHLLPVMAKVVVLSPGTLQEDQATLLSKRLVDWLRYASLQQGLPHSGGFFSTPRARQPGPVTEVDGAVATDFFTVLSSGHRFTDDQWLNVQAFSMLRAWLLHSGPEGPGTLDTDDRSEQEGSTLSVISATSSAGRLLPPRERLREVAFEYCQRLIEQSNRRALRKGDSDLQKACLVEAVLVLDVLCRQDPSFLYRSLSCLKALHGRVRGDPASVRVLLPLAHFFLSHGEAAAVDSEAVYQHLFTRIPVEQFHSPMLAFEFIQFCRDNLHLFSGHLSTLRLSFPNLFKFLAWNSPPLTSEFVALLPALVDAGTALEMLHALLDLPCLTAVLDLQLRSAPAASERPLWDTSLRAPSCLEAFRDPQFQGLFQYLLRPKASGATERLAPLHQLLQPMAGCARVAQCAQAVPTLLQAFFSAVTQVADGSLINQLALLLLGRSDSLYPAPGYAAGVHSVLSSQFLALCTLKPSLVVELARDLLEFLGSVNGLCSRASLVTSVVWAIGEYLSVTYDRRCTVEQINKFFEALEALLFEVTQCRPSAALPRCPPQVVTVLMTTLTKLASRSQDLIPRASLLLSKMRTLAHSPATSSTHSEEGAEAIRTRATELLTLLKMPSVAQFVLTPSTEVCSPRYHRDANTALPLALRTVSRLVEREAGLMPG

SEQ ID NO: 3832 - protein, 360 aa, Homo sapiens
MGLLLLVPLLLLPGSYGLPFYNGFYYSNSANDQNLGNGHGKDLLNGVKLVVETPEETLFTYQGASVILPCRYRYEPALVSPRRVRVKWWKLSENGAPEKDVLVAIGLRHRSFGDYQGRVHLRQDKEHDVSLEIQDLRLEDYGRYRCEVIDGLEDESGLVELELRGVVFPYQSPNGRYQFNFHEGQQVCAEQAAVVASFEQLFRAWEEGLDWCNAGWLQDATVQYPIMLPRQPCGGPGLAPGVRSYGPRHRRLHRYDVFCFATALKGRVYYLEHPEKLTLTEAREACQEDDATIAKVGQLFAAWKFHGLDRCDAGWLADGSVRYPVVHPHPNCGPPEPGVRSFGFPDPQSRLYGVYCYRQH

SEQ ID NO: 3833 - protein, 113 aa, Homo sapiens
MSASVVSVISRFLEEYLSSTPQRLKLLDAYLLYILLTGALQFGYCLLVGTFPFNSFLSGFISCVGSFILAVCLRIQINPQNKADFQGISPERAFADFLFASTILHLVVMNFVG

SEQ ID NO: 3834 - protein, 1097 aa, Homo sapiens
MATQVMGQSSGGGGLFTSSGNIGMALPNDMYDLHDLSKAELAAPQLIMLANVALTGEVNGSCCDYLVGEERQMAELMPVGDNNFSDSEEGEGLEESADIKGEPHGLENMELRSLELSVVEPQPVFEASGAPDIYSSNKDLPPETPGAEDKGKSSKTKPFRCKPCQYEAESEEQFVHHIRVHSAKKFFVEESAEKQAKARESGSSTAEEGDFSKGPIRCDRCGYNTNRYDHYTAHLKHHTRAGDNERVYKCIICTYTTVSEYHWRKHLRNHFPRKVYTCGKCNYFSDRKNNYVQHVRTHTGERPYKCELCPYSSSQKTHLTRHMRTHSGEKPFKCDQCSYVASNQHEVTRHARQVHNGPKPLNCPHCDYKTADRSNFKKHVELHVNPRQFNCPVCDYAASKKCNLQYHFKSKHPTCPNKTMDVSKVKLKKTKKREADLPDNITNEKTEIEQTKIKGDVAGKKNEKSVKAEKRDVSKEKKPSNNVSVIQVTTRTRKSVTEVKEMDVHTGSNSEKFSKTKKSKRKLEVDSHSLHGPVNDEESSTKKKKKVESKSKNNSQEVPKGDSKVEENKKQNTCMKKSTKKKTLKNKSSKKSSKPPQKEPVEKGSAQMDPPQMGPAPTEAVQKGPVQVELPPPMEHAQMEGAQIRPAPDEPVQMEVVQEGPAQKELLPPVEPAQMVGAQIVLAHMELPPPMETAQTEVAQMGPAPMEPAQMEVAQVESAPMQVVQKEPVQMELSPPMEVVQKEPVQIELSPPMEVVQKEPVKIELSPPIEVVQKEPVQMELSPPMGVVQKEPAQREPPPPREPPLHMEPISKKPPLRKDKKEKSNMQSERARKEQVLIEVGLVPVKDSWLLKESVSTEDLSPPSPPLPKENLREEASGDQKLLNTGEGNKEAPLQKVGAEEADESLPGLAANINESTHISSSGQNLNTPEGETLNGKHQTDSIVCEMKMDTDQNTRENLTGINSTVEEPVSPMLPPSAVEEREAVSKTALASPPATMAANESQEIDEDEGIHSHEGSDLSDNMSEGSDDSGLHGARPVPQESSRKNAKEALAVKAAKGDFVCIFCDRSFRKGKDYSKHLNRHLVNVYYLEEAAQGQE

SEQ ID NO: 3835 - protein, 235 aa, Homo sapiens
MTVLAPAWSPTTYLLLLLLLSSGLSGTQDCSFQHSPISSDFAVKIRELSDYLLQDYPVTVASNLQDEELCGGLWRLVLAQRWMERLKTVAGSKMQGLLERVNTEIHFVTKCAFQPPPSCLRFVQTNISRLLQETSEQLVALKPWITRQNFSRCLELQCQPDSSTLPPPWSPRPLEATAPTAPQPPLLLLLLLPVGLLLLAAAWCLHWQRTRRRTPRPGEQVPPVPSPQDLLLVEH

SEQ ID NO: 3836 - protein, 230 aa, Homo sapiens
MEGQRWLPLEANPEVTNQFLKQLGLHPNWQFVDVYGMDPELLSMVPRPVCAVLLLFPITEKYEVFRTEEEEKIKSQGQDVTSSVYFMKQTISNACGTIGLIHAIANNKDKMHFESGSTLKKFLEESVSMSPEERARYLENYDAIRVTHETSAHEGQTEAPSIDEKVDLHFIALVHVDGHLYELDGRKPFPINHGETSDETLLEDAIEVCKKFMERDPDELRFNAIALSAA

SEQ ID NO: 3837 - protein, 477 aa, Homo sapiens
MGRTVVVLGGGISGLAASYHLSRAPCPPKVVLVESSERLGGWIRSVRGPNGAIFELGPRGIRPAGALGARTLLLVSELGLDSEVLPVRGDHPAAQNRFLYVGGALHALPTGLRGLLRPSPPFSKPLFWAGLRELTKPRGKEPDETVHSFAQRRLGPEVASLAMDSLCRGVFAGNSRELSIRSCFPSLFQAEQTHRSILLGLLLGAGRTPQPDSALIRQALAERWSQWSLRGGLEMLPQALETHLTSRGVSVLRGQPVCGLSLQAEGRWKVSLRDSSLEADHVISAIPASVLSELLPAEAAPLARALSAITAVSVAVVNLQYQGAHLPVQGFGHLVPSSEDPGVLGIVYDSVAFPEQDGSPPGLRVTVMLGGSWLQTLEASGCVLSQELFQQRAQEAAATQLGLKEMPSHCLVHLHKNCIPQYTLGHWQKLESARQFLTAHRLPLTLAGASYEGVAVNDCIESGRQAAVSVLGTEPNS

SEQ ID NO: 3838 - protein, 244 aa, Homo sapiens
MNGPADGEVDYKKKYRNLKRKLKFLIYEHECFQEELRKAQRKLLKVSRDKSFLLDRLLQYENVDEDSSDSDATASSDNSETEGTPKLSDTPAPKRKRSPPLGGAPSPSSLSLPPSTGFPLQASGVPSPYLSSLASSRYPPFPSDYLALQLPEPSPLRPKREKRPRLPRKLKMAVGPPDCPVGGPLTFPGRGSGAGVGTTLTPLPPPKMPPPTILSTVPRQMFSDAGSGDDALDGDDDLVIDIPE

SEQ ID NO: 3839 - protein, 145 aa, Homo sapiens
MNGRVDYLVTEEEINLTRGPSGLGFNIVGGTDQQYVSNDSGIYVSRIKENGAAALDGRLQEGDKILSANGQDLKNLLHQDAVDLFRNAGYAVSLRVQHRLQVQNGPIGHRGEGDPSGIPIFMVLVPVFALTMVAAWAFMRYRQQL

SEQ ID NO: 3840 - protein, 538 aa, Homo sapiens
MNLELLESFGQNYPEEADGTLDCISMALTCTFNRWGTLLAVGCNDGRIVIWDFLTRGIAKIISAHIHPVCSLCWSRDGHKLVSASTDNIVSQWDVLSGDCDQRFRFPSPILKVQYHPRDQNKVLVCPMKSAPVMLTLSDSKHVVLPVDDDSDLNVVASFDRRGEYIYTGNAKGKILVLKTDSQDLVASFRVTTGTSNTTAIKSIEFARKGSCFLINTADRIIRVYDGREILTCGRDGEPEPMQKLQDLVNRTPWKKCCFSGDGEYIVAGSARQHALYIWEKSIGNLVKILHGTRGELLLDVAWHPVRPIIASISSGVVSIWAQNQVENWSAFAPDFKELDENVEYEERESEFDIEDEDKSEPEQTGADAAEDEEVDVTSVDPIAAFCSSDEELEDSKALLYLPIAPEVEDPEENPYGPPPDAVQTSLMDEGASSEKKRQSSADGSQPPKKKPKTTNIELQGVPNDEVHPLLGVKGDGKSKKKQAGRPKGSKGKEKDSPFKPKLYKGDRGLPLEGSAKGKVQAELSQPLTAGGAISELL

SEQ ID NO: 3841 - protein, 199 aa, Homo sapiens
MDGQKKNWKDKVVDLLYWRDIKKTGVVFGASLFLLLSLTVFSIVSVTAYIALALLSVTISFRIYKGVIQAIQKSDEGHPFRAYLESEVAISEELVQKYSNSALGHVNCTIKELRRLFLVDDLVDSLKFAVLMWVFTYVGALFNGLTLLILALISLFSVPVIYERHQAQIDHYLGLANKNVKDAMAKIQAKIPGLKRKAE

SEQ ID NO: 3842 - protein, 1192 aa, Homo sapiens
MEDLDQSPLVSSSDSPPRPQPAFKYQFVREPEDEEEEEEEEEEDEDEDLEELEVLERKPAAGLSAAPVPTAPAAGAPLMDFGNDFVPPAPRGPLPAAPPVAPERQPSWDPSPVSSTVPAPSPLSAAAVSPSKLPEDDEPPARPPPPPPASVSPQAEPVWTPPAPAPAAPPSTPAAPKRRGSSGSVDETLFALPAASEPVIRSSAENMDLKEQPGNTISAGQEDFPSVLLETAASLPSLSPLSAASFKEHEYLGNLSTVLPTEGTLQENVSEASKEVSEKAKTLLIDRDLTEFSELEYSEMGSSFSVSPKAESAVIVANPREEIIVKNKDEEEKLVSNNILHNQQELPTALTKLVKEDEVVSSEKAKDSFNEKRVAVEAPMREEYADFKPFERVWEVKDSKEDSDMLAAGGKIESNLESKVDKKCFADSLEQTNHEKDSESSNDDTSFPSTPEGIKDRSGAYITCAPFNPAATESIATNIFPLLGDPTSENKTDEKKIEEKKAQIVTEKNTSTKTSNPFLVAAQDSETDYVTTDNLTKVTEEVVANMPEGLTPDLVQEACESELNEVTGTKIAYETKMDLVQTSEVMQESLYPAAQLCPSFEESEATPSPVLPDIVMEAPLNSAVPSAGASVIQPSSSPLEASSVNYESIKHEPENPPPYEEAMSVSLKKVSGIKEEIKEPENINAALQETEAPYISIACDLIKETKLSAEPAPDFSDYSEMAKVEQPVPDHSELVEDSSPDSEPVDLFSDDSIPDVPQKQDETVMLVKESLTETSFESMIEYENKEKLSALPPEGGKPYLESFKLSLDNTKDTLLPDEVSTLSKKEKIPLQMEELSTAVYSNDDLFISKEAQIRETETFSDSSPIEIIDEFPTLISSKTDSFSKLAREYTDLEVSHKSEIANAPDGAGSLPCTELPHDLSLKNIQPKVEEKISFSDDFSKNGSATSKVLLLPPDVSALATQAEIESIVKPKVLVKEAEKKLPSDTEKEDRSPSAIFSAELSKTSVVDLLYWRDIKKTGVVFGASLFLLLSLTVFSIVSVTAYIALALLSVTISFRIYKGVIQAIQKSDEGHPFRAYLESEVAISEELVQKYSNSALGHVNCTIKELRRLFLVDDLVDSLKFAVLMWVFTYVGALFNGLTLLILALISLFSVPVIYERHQAQIDHYLGLANKNVKDAMAKIQAKIPGLKRKAE

SEQ ID NO: 3843 - protein, 373 aa, Homo sapiens
MEDLDQSPLVSSSDSPPRPQPAFKYQFVREPEDEEEEEEEEEEDEDEDLEELEVLERKPAAGLSAAPVPTAPAAGAPLMDFGNDFVPPAPRGPLPAAPPVAPERQPSWDPSPVSSTVPAPSPLSAAAVSPSKLPEDDEPPARPPPPPPASVSPQAEPVWTPPAPAPAAPPSTPAAPKRRGSSGSVVVDLLYWRDIKKTGVVFGASLFLLLSLTVFSIVSVTAYIALALLSVTISFRIYKGVIQAIQKSDEGHPFRAYLESEVAISEELVQKYSNSALGHVNCTIKELRRLFLVDDLVDSLKFAVLMWVFTYVGALFNGLTLLILALISLFSVPVIYERHQAQIDHYLGLANKNVKDAMAKIQAKIPGLKRKAE

SEQ ID NO: 3844 - protein, 392 aa, Homo sapiens
MEDLDQSPLVSSSDSPPRPQPAFKYQFVREPEDEEEEEEEEEEDEDEDLEELEVLERKPAAGLSAAPVPTAPAAGAPLMDFGNDFVPPAPRGPLPAAPPVAPERQPSWDPSPVSSTVPAPSPLSAAAVSPSKLPEDDEPPARPPPPPPASVSPQAEPVWTPPAPAPAAPPSTPAAPKRRGSSGSVDETLFALPAASEPVIRSSAVVDLLYWRDIKKTGVVFGASLFLLLSLTVFSIVSVTAYIALALLSVTISFRIYKGVIQAIQKSDEGHPFRAYLESEVAISEELVQKYSNSALGHVNCTIKELRRLFLVDDLVDSLKFAVLMWVFTYVGALFNGLTLLILALISLFSVPVIYERHQAQIDHYLGLANKNVKDAMAKIQAKIPGLKRKAE

SEQ ID NO: 3845 - protein, 986 aa, Homo sapiens
MDLKEQPGNTISAGQEDFPSVLLETAASLPSLSPLSAASFKEHEYLGNLSTVLPTEGTLQENVSEASKEVSEKAKTLLIDRDLTEFSELEYSEMGSSFSVSPKAESAVIVANPREEIIVKNKDEEEKLVSNNILHNQQELPTALTKLVKEDEVVSSEKAKDSFNEKRVAVEAPMREEYADFKPFERVWEVKDSKEDSDMLAAGGKIESNLESKVDKKCFADSLEQTNHEKDSESSNDDTSFPSTPEGIKDRSGAYITCAPFNPAATESIATNIFPLLGDPTSENKTDEKKIEEKKAQIVTEKNTSTKTSNPFLVAAQDSETDYVTTDNLTKVTEEVVANMPEGLTPDLVQEACESELNEVTGTKIAYETKMDLVQTSEVMQESLYPAAQLCPSFEESEATPSPVLPDIVMEAPLNSAVPSAGASVIQPSSSPLEASSVNYESIKHEPENPPPYEEAMSVSLKKVSGIKEEIKEPENINAALQETEAPYISIACDLIKETKLSAEPAPDFSDYSEMAKVEQPVPDHSELVEDSSPDSEPVDLFSDDSIPDVPQKQDETVMLVKESLTETSFESMIEYENKEKLSALPPEGGKPYLESFKLSLDNTKDTLLPDEVSTLSKKEKIPLQMEELSTAVYSNDDLFISKEAQIRETETFSDSSPIEIIDEFPTLISSKTDSFSKLAREYTDLEVSHKSEIANAPDGAGSLPCTELPHDLSLKNIQPKVEEKISFSDDFSKNGSATSKVLLLPPDVSALATQAEIESIVKPKVLVKEAEKKLPSDTEKEDRSPSAIFSAELSKTSVVDLLYWRDIKKTGVVFGASLFLLLSLTVFSIVSVTAYIALALLSVTISFRIYKGVIQAIQKSDEGHPFRAYLESEVAISEELVQKYSNSALGHVNCTIKELRRLFLVDDLVDSLKFAVLMWVFTYVGALFNGLTLLILALISLFSVPVIYERHQAQIDHYLGLANKNVKDAMAKIQAKIPGLKRKAE

SEQ ID NO: 3846 - protein, 919 aa, Homo sapiens
MQRSIMSFFHPKKEGKAKKPEKEASNSSRETEPPPKAALKEWNGVVSESDSPVKRPGRKAARVLGSEGEEEDEALSPAKGQKPALDCSQVSPPRPATSPENNASLSDTSPMDSSPSGIPKRRTARKQLPKRTIQEVLEEQSEDEDREAKRKKEEEEEETPKESLTEAEVATEKEGEDGDQPTTPPKPLKTSKAETPTESVSEPEVATKQELQEEEEQTKPPRRAPKTLSSFFTPRKPAVKKEVKEEEPGAPGKEGAAEGPLDPSGYNPAKNNYHPVEDACWKPGQKVPYLAVARTFEKIEEVSARLRMVETLSNLLRSVVALSPPDLLPVLYLSLNHLGPPQQGLELGVGDGVLLKAVAQATGRQLESVRAEAAEKGDVGLVAENSRSTQRLMLPPPPLTASGVFSKFRDIARLTGSASTAKKIDIIKGLFVACRHSEARFIARSLSGRLRLGLAEQSVLAALSQAVSLTPPGQEFPPAMVDAGKGKTAEARKTWLEEQGMILKQTFCEVPDLDRIIPVLLEHGLERLPEHCKLSPGIPLKPMLAHPTRGISEVLKRFEEAAFTCEYKYDGQRAQIHALEGGEVKIFSRNQEDNTGKYPDIISRIPKIKLPSVTSFILDTEAVAWDREKKQIQPFQVLTTRKRKEVDASEIQVQVCLYAFDLIYLNGESLVREPLSRRRQLLRENFVETEGEFVFATSLDTKDIEQIAEFLEQSVKDSCEGLMVKTLDVDATYEIAKRSHNWLKLKKDYLDGVGDTLDLVVIGAYLGRGKRAGRYGGFLLASYDEDSEELQAICKLGTGFSDEELEEHHQSLKALVLPSPRPYVRIDGAVIPDHWLDPSAVWEVKCADLSLSPIYPAARGLVDSDKGISLRFPRFIRVREDKQPEQATTSAQVACLYRKQSQIQNQQGEDSGSDPEDTY

SEQ ID NO: 3847 - protein, 334 aa, Homo sapiens
MSQSKGKKRNPGLKIPKEAFEQPQTSSTPPRDLDSKACISIGNQNFEVKADDLEPIMELGRGAYGVVEKMRHVPSGQIMAVKRIRATVNSQEQKRLLMDLDISMRTVDCPFTVTFYGALFREGDVWICMELMDTSLDKFYKQVIDKGQTIPEDILGKIAVSIVKALEHLHSKLSVIHRDVKPSNVLINALGQVKMCDFGISGYLVDSVAKTIDAGCKPYMAPERINPELNQKGYSVKSDIWSLGITMIELAILRFPYDSWGTPFQQLKQVVEEPSPQLPADKFSAEFVDFTSQCLKKNSKERPTYPELMQHPFFTLHESKGTDVASFVKLILGD

SEQ ID NO: 3848 - protein, 278 aa, Homo sapiens
MELGRGAYGVVEKMRHVPSGQIMAVKRIRATVNSQEQKRLLMDLDISMRTVDCPFTVTFYGALFREGDMWICMELMDTSLDKFYKQVIDKGQTIPEDILGKIAVSIVKALEHLHSKLSVIHRDVKPSNVLINALGQVKMCDFGISGYLVDSVAKTIDAGCKPYMAPERINPELNQKGYSVKSDIWSLGITMIELAILRFPYDSWGTPFQQLKQVVEEPSPQLPADKFSAEFVDFTSQCLKKNSKERPTYPELMQHPFFTLHESKGTDVASFVKLILGD

SEQ ID NO: 3849 - protein, 403 aa, Homo sapiens
MQRAVSVVARLGFRLQAFPPALCRPLSCAQEVLRRTPLYDFHLAHGGKMVAFAGWSLPVQYRDSHTDSHLHTRQHCSLFDVSHMLQTKILGSDRVKLMESLVVGDIAELRPNQGTLSLFTNEAGGILDDLIVTNTSEGHLYVVSNAGCWEKDLALMQDKVRELQNQGRDVGLEVLDNALLALQGPTAAQVLQAGVADDLRKLPFMTSAVMEVFGVSGCRVTRCGYTGEDGVEISVPVAGAVHLATAILKNPEVKLAGLAARDSLRLEAGLCLYGNDIDEHTTPVEGSLSWTLGKRRRAAMDFPGAKVIVPQLKGRVQRRRVGLMCEGAPMRAHSPILNMEGTKIGTVTSGCPSPSLKKNVAMGYVPCEYSRPGTMLLVEVRRKQQMAVVSKMPFVPTNYYTLK

SEQ ID NO: 3850 - protein, 399 aa, Homo sapiens
MRAAEQAGCMVSASRAGQPEAGPWSCSGVILSRSPGLVLCHGGIFVPFLRAGSEVLAAAGAVFLPGDSCRDDLRLHVQWAPTAAGPGGGAERGRPGLCTPQCASLEPGPPAPSRGRPLQPRLPAELLLLLSCPAFWAHFARLFGDEAAEQWRFSSAARDDEVSEDEEADQLRALGWFALLGVRLGQEEVEEERGPAMGGVASRGRAQGCAIAGLRLPFRRLLPRHLSQHAELRGAQQRGRPTAAYRRTLPSRHRGRRRVHRAARGGAGGAGGGAALLEGRRMGGLHAALRRRPPFPRRPRRASPPAAQHRCPGRPSAARGGRPVGSAPPRLRAPVGSRGSVGGVRHRMGLRSGCGTPPCSDLSARVPSGSSQGPGALHHPQECGHLGPCGICHSGDMSL

SEQ ID NO: 3851 - protein, 632 aa, Homo sapiens
MNGAGPGPAAAAPVPVPVPVPDWRQFCELHAQAAAVDFAHKFCRFLRDNPAYDTPDAGASFSRHFAANFLDVFGEEVRRVLVAGPTTRGAAVSAEAMEPELADTSALKAASYGHSRSSEDVSTHAATKARVRKGFSLRNMSLCVVDGVRDMWHRRASPEPDAAAAPRTAEPRDKWTRRLRLSRTLAAKVELVDIQREGALRFMVADDAAAGSGGSAQWQKCRLLLRRAVAEERFRLEFFVPPKASRPKVSIPLSAIIEVRTTMPLEMPEKDNTFVLKVENGAEYILETIDSLQKHSWVADIQGCVDPGDSEEDTELSCTRGGCLASRVASCSCELLTDAVDLPRPPETTAVGAVVTAPHSRGRDAVRESLIHVPLETFLQTLESPGGSGSDSNNTGEQGAETDPEAEPELELSDYPWFHGTLSRVKAAQLVLAGGPRNHGLFVIRQSETRPGEYVLTFNFQGKAKHLRLSLNGHGQCHVQHLWFQSVLDMLRHFHTHPIPLESGGSADITLRSYVRAQDPPPEPGPTPPAAPASPACWSDSPGQHYFSSLAAAACPPASPSDAAGASSSSASSSSAASGPAPPRPVEGQLSARSRSNSAERLLEAVAATAAEEPPEAAPGRARAVENQYSFY

SEQ ID NO: 3852 - protein, 716 aa, Homo sapiens
MQSTANYLWHTDDLLGQGATASVYKARNKKSGELVAVKVFNTTSYLRPREVQVREFEVLRKLNHQNIVKLFAVEETGGSRQKVLVMEYCSSGSLLSVLESPENAFGLPEDEFLVVLRCVVAGMNHLRENGIVHRDIKPGNIMRLVGEEGQSIYKLTDFGAARELDDDEKFVSVYGTEEYLHPDMYERAVLRKPQQKAFGVTVDLWSIGVTLYHAATGSLPFIPFGGPRRNKEIMYRITTEKPAGAIAGAQRRENGPLEWSYTLPITCQLSLGLQSQLVPILANILEVEQAKCWGFDQFFAETSDILQRVVVHVFSLSQAVLHHIYIHAHNTIAIFQEAVHKQTSVAPRHQEYLFEGHLCVLEPSVSAQHIAHTTASSPLTLFSTAIPKGLAFRDPALDVPKFVPKVDLQADYNTAKGVLGAGYQALRLARALLDGQELMFRGLHWVMEVLQATCRRTLEVARTSLLYLSSSLGTERFSSVAGTPEIQELKAAAELRSRLRTLAEVLSRCSQNITETQESLSSLNRELVKSRDQVHEDRSIQQIQCCLDKMNFIYKQFKKSRMRPGLGYNEEQIHKLDKVNFSHLAKRLLQVFQEECVQKYQASLVTHGKRMRVVHETRNHLRLVGCSVAACNTEAQGVQESLSKLLEELSHQLLQDRAKGAQASPPPIAPYPSPTRKDLLLHMQELCEGMKLLASDLLDNNRIIERLNRVPAPPDV

SEQ ID NO: 3853 - protein, 328 aa, Homo sapiens
MAAGTAARKAAPVLEAPPQQEQLSHTKLSAEDTWNLQQERMYKMHRGHDSMHVEMILIFLCVLVIAQIVLVQWRQRHGRSYNLVTLLQMWVVPLYFTIKLYWWRFLSMWGMFSVITSYILFRATRKPLSGRTPRLVYKWFLLIYKLSYAFGVVGYLAIMFTMCGFNLFFKIKARDSMDFGIVSLFYGLYYGVMGRDFAEICSDYMASTIGFYSVSRLPTRSLSDNICAVCGQKIIVELDEEGLIENTYQLSCNHVFHEFCIRGWCIVGKKQTCPYCKEKVDLKRMISNPWERTHFLYGQILDWLRYLVAWQPVVIGIVQGINYSLGLE

SEQ ID NO: 3854 - protein, 71 aa, Homo sapiens
MVNVLKGVLIECDPAMKQFLLYLDESNALGKKFIIQDIDDTHVFVIAELVNVLQERVGELMDQNAFSLTQK

SEQ ID NO: 3855 - protein, 612 aa, Homo sapiens
MAAAGRLPSSWALFSPLLAGLALLGVGPVPARALHNVTAELFGAEAWGTLAAFGDLNSDKQTDLFVLRERNDLIVFLADQNAPYFKPKVKVSFKNHSALITSVVPGDYDGDSQMDVLLTYLPKNYAKSELGAVIFWGQNQTLDPNNMTILNRTFQDEPLIMDFNGDLIPDIFGITNESNQPQILLGGNLSWHPALTTTSKMRIPHSHAFIDLTEDFTADLFLTTLNATTSTFQFEIWENLDGNFSVSTILEKPQNMMVVGQSAFADFDGDGHMDHLLPGCEDKNCQKSTIYLVRSGMKQWVPVLQDFSNKGTLWGFVPFVDEQQPTEIPIPITLHIGDYNMDGYPDALVILKNTSGSNQQAFLLENVPCNNASCEEARRMFKVYWELTDLNQIKDAMVATFFDIYEDGILDIVVLSKGYTKNDFAIHTLKNNFEADAYFVKVIVLSGLCSNDCPRKITPFGVNQPGPYIMYTTVDANGYLKNGSAGQLSQSAHLALQLPYNVLGLGRSANFLDHLYVGIPRPSGEKSIRKQEWTAIIPNSQLIVIPYPHNVPRSWSAKLYLTPSNIVLLTAIALIGVCVFILAIIGILHWQEKKADDREKRQEAHRFHFDAM

SEQ ID NO: 3856 - protein, 2627 aa, Homo sapiens
MEKLHGHVSAHPDILSLENRCLAMLPDLQPLEKLHQHVSTHSDILSLKNQCLATLPDLKTMEKPHGYVSAHPDILSLENQCLATLSDLKTMEKPHGHVSAHPDILSLENRCLATLSSLKSTVSASPLFQSLQISHMTQADLYRVNNSNCLLSEPPSWRAQHFSKGLDLSTCPIALKSISATETAQEATLGRWFDSEEKKGAETQMPSYSLSLGEEEEVEDLAVKLTSGDSESHPEPTDHVLQEKKMALLSLLCSTLVSEVNMNNTSDPTLAAIFEICRELALLEPEFILKASLYARQQLNVRNVANNILAIAAFLPACRPHLRRYFCAIVQLPSDWIQVAELYQSLAEGDKNKLVPLPACLRTAMTDKFAQFDEYQLAKYNPRKHRAKRHPRRPPRSPGMEPPFSHRCFPRYIGFLREEQRKFEKAGDTVSEKKNPPRFTLKKLVQRLHIHKPAQHVQALLGYRYPSNLQLFSRSRLPGPWDSSRAGKRMKLSRPETWERELSLRGNKASVWEELIENGKLPFMAMLRNLCNLLRVGISSRHHELILQRLQHAKSVIHSRQFPFRFLNAHDAIDALEAQLRNQALPFPSNITLMRRILTRNEKNRPRRRFLCHLSRQQLRMAMRIPVLYEQLKREKLRVHKARQWKYDGEMLNRYRQALETAVNLSVKHSLPLLPGRTVLVYLTDANADRLCPKSNPQGPPLNYALLLIGMMITRAEQVDVVLCGGDTLKTAVLKAEEGILKTAIKLQAQVQEFDENDGWSLNTFGKYLLSLAGQRVPVDRVILLGQSMDDGMINVAKQLYWQRVNSKCLFVGILLRRVQYLSTDLNPNDVTLSGCTDAILKFIAEHGASHLLEHVGQMDKIFKIPPPPGKTGVQSLRPLEEDTPSPLAPVSQQGWRSIRLFISSTFRDMHGERDLLLRSVLPALQARAAPHRISLHGIDLRWGVTEEETRRNRQLEVCLGEVENAQLFVGILGSRYGYIPPSYNLPDHPHFHWAQQYPSGRSVTEMEVMQFLNRNQRLQPSAQALIYFRDSSFLSSVPDAWKSDFVSESEEAARRISELKSYLSRQKGITCRRYPCEWGGVAAGRPYVGGLEEFGQLVLQDVWNMIQKLYLQPGALLEQPVSIPDDDLVQATFQQLQKPPSPARPRLLQDTVQRLMLPHGRLSLVTGQSGQGKTAFLASLVSALQAPDGAKVASLVFFHFSGARPDQGLALTLLRRLCTYLRGQLKEPGALPSTYRSLVWELQQRLLPKSAESLHPGQTQVLIIDGADRLVDQNGQLISDWIPKKLPRCVHLVLSVSSDAGLGETLEQSQGAHVLALGPLEASARARLVREELALYGKRLEESPFNNQMRLLLVKRESGRPLYLRLVTDHLRLFTLYEQVSERLRTLPATVPLLLQHILSTLEKEHGPDVLPQALTALEVTRSGLTVDQLHGVLSVWRTLPKGTKSWEEAVAAGNSGDPYPMGPFACLVQSLRSLLGEGPLERPGARLCLPDGPLRTAAKRCYGKRPGLEDTAHILIAAQLWKTCDADASGTFRSCPPEALGDLPYHLLQSGNRGLLSKFLTNLHVVAAHLELGLVSRLLEAHALYASSVPKEEQKLPEADVAVFRTFLRQQASILSQYPRLLPQQAANQPLDSPLCHQASLLSRRWHLQHTLRWLNKPRTMKNQQSSSLSLAVSSSPTAVAFSTNGQRAAVGTANGTVYLLDLRTWQEEKSVVSGCDGISACLFLSDDTLFLTAFDGLLELWDLQHGCRVLQTKAHQYQITGCCLSPDCRLLATVCLGGCLKLWDTVRGQLAFQHTYPKSLNCVAFHPEGQVIATGSWAGSISFFQVDGLKVTKDLGAPGASIRTLAFNVPGGVVAVGRLDSMVELWAWREGARLAAFPAHHGFVAAALFLHAGCQLLTAGEDGKVQVWSGSLGRPRGHLGSLSLSPALSVALSPDGDRVAVGYRADGIRIYKISSGSQGAQGQALDVAVSALAWLSPKVLVSGAEDGSLQGWALKECSLQSLWLLSRFQKPVLGLATSQELLASASEDFTVQLWPRQLLTRPHKAEDFPCGTELRGHEGPVSCCSFSTDGGSLATGGRDRSLLCWDVRTPKTPVLIHSFPACHRDWVTGCAWTKDNLLISCSSDGSVGLWDPESGQRLGQFLGHQSAVSAVAAVEEHVVSVSRDGTLKVWDHQGVELTSIPAHSGPISHCAAAMEPRAAGQPGSELLVVTVGLDGATRLWHPLLVCQTHTLLGHSGPVRAAAVSETSGLMLTASEDGSVRLWQVPKEADDTCIPRSSAAVTAVAWAPDGSMAVSGNQAGELILWQEAKAVATAQAPGHIGALIWSSAHTFFVLSADEKISEWQVKLRKGSAPGNLSLHLNRILQEDLGVLTSLDWAPDGHFLILAKADLKLLCMKPGDAPSEIWSSYTENPMILSTHKEYGIFVLQPKDPGVLSFLRQKESGEFEERLNFDINLENPSRTLISITQAKPESESSFLCASSDGILWNLAKCSPEGEWTTGNMWQKKANTPETQTPGTDPSTCRESDASMDSDASMDSEPTPHLKTRQRRKIHSGSVTALHVLPELLVTASKDRDVKLWERPSMQLLGLFRCEGSVSCLEPWLGANSTLQLAVGDVQGNVYFLNWE

SEQ ID NO: 3857 - protein, 76 aa, Homo sapiens
MAETDPKTVQDLTSVVQTLLQQMQDKFQTMSDQIIGRIDDMSSRIDDLEKNIADLMTQAGVEELESENKIPATQKS

SEQ ID NO: 3858 - protein, 584 aa, Homo sapiens
MANEDCPKAADSPFSSDKHAQLILAQINKMRNGQHFCDVQLQVGQESFKAHRLVLAASSPYFAALFTGGMKESSKDVVPILGIEAGIFQILLDFIYTGIVNIGVNNVQELIIAADMLQLTEVVHLCCEFLKGQIDPLNCIGIFQFSEQIACHDLLEFSENYIHVHFLEVHSGEEFLALTKDQLIKILRSEELSIEDEYQVFLAAMQWILKDLGKRRKHVVEVLDPIRFPLLPPQRLLKYIEGVSDFNLRVALQTLLKEYCEVCKSPKENKFCSFLQTSKVRPRKKARKYLYAVGGYTRLQGGRWSDSRALSCVERFDTFSQYWTTVSSLHQARSGLGVTVLGGMVYAIGGEKDSMIFDCTECYDPVTKQWTTVASMNHPRCGLGVCVCYGAIYALGGWVGAEIGNTIERFDPDENKWEVVGNMAVSRYYFGCCEMQGLIYVIGGISNEGIELRSFEVYDPLSKRWSPLPPMGTRRAYLGVAALNDCIYSVGGWNETQDALHTVEKYSFEEEKWVEVASMKVPRAGMCVVAVNGLLYVSGGRSSSHDFLAPGTLDSVEVYNPHSDTWTEIGNMITSRCEGGVAVL

SEQ ID NO: 3859 - protein, 279 aa, Homo sapiens
MSRERPPGTDIPRNLSFIAALTERAYYRSQRPSLEEEPEEEPGEGGTRFGARSRAHAPSRGRRARSAPAGGGGARAPRSRSPDTRKRVRFADALGLELAVVRRFRPGELPRVPRHVQIQLQRDALRHFAPCQPRARGLQEARAALEPASEPGFAARLLTQRICLERAEAGPLGVAGSARVVDLAYEKRVSVRWSADGWRSQREAPAAYAGPAPPPPRADRFAFRLPAPPIGGALLFALRYRVTGHEFWDNNGGRDYALRGPEHPGSGGAPEPQGWIHFI

SEQ ID NO: 3860 - protein, 279 aa, Homo sapiens; identical to SEQ ID NO: 3859

SEQ ID NO: 3861 - protein, 1630 aa, Homo sapiens
MLKCIPLWRCNRHVESVDKRHCSLQAVPEEIYRYSRSLEELLLDANQLRELPKPFFRLLNLRKLGLSDNEIQRLPPEVANFMQLVELDVSRNDIPEIPESIKFCKALEIADFSGNPLSRLPDGFTQLRSLAHLALNDVSLQALPGDVGNLANLVTLELRENLLKSLPASLSFLVKLEQLDLGGNDLEVLPDTLGALPNLRELWLDRNQLSALPPELGNLRRLVCLDVSENRLEELPAELGGLVLLTDLLLSQNLLRRLPDGIGQLKQLSILKVDQNRLCEVTEAIGDCENLSELILTENLLMALPRSLGKLTKLTNLNVDRNHLEALPPEIGGCVALSVLSLRDNRLAVLPPELAHTTELHVLDVAGNRLQSLPFALTHLNLKALWLAENQAQPMLRFQTEDDARTGEKVLTCYLLPQQPPLSLEDAGQQGSLSETWSDAPPSRVSVIQFLEAPIGDEDAEEAAAEKRGLQRRATPHPSELKVMKRSIEGRRSEACPCQPDSGSPLPAEEEKRLSAESGLSEDSRPSASTVSEAEPEGPSAEAQGGSQQEATTAGGEEDAEEDYQEPTVHFAEDALLPGDDREIEEGQPEAPWTLPGGRQRLIRKDTPHYKKHFKISKLPQPEAVVALLQGMQPDGEGPVAPGGWHNGPHAPWAPRAQKEEEEEEEGSPQEEEEEEEEENRAEEEEASTEEEDKEGAVVSAPSVKGVSFDQANNLLIEPARIEEEELTLTILRQTGGLGISIAGGKGSTPYKGDDEGIFISRVSEEGPAARAGVRVGDKLLEVNGVALQGAEHHEAVEALRGAGTAVQMRVWRERMVEPENAVTITPLRPEDDYSPRERRGGGLRLPLLPPESPGPLRQRHVACLARSERGLGFSIAGGKGSTPYRAGDAGIFVSRIAEGGAAHRAGTLQVGDRVLSINGVDVTEARHDHAVSLLTAASPTIALLLEREAGGPLPPSPLPHSSPPTAAVATTSITTATPGVPGLPSLAPSLLAAALEGPYPVEEIRLPRAGGPLGLSIVGGSDHSSHPFGVQEPGVFISKVLPRGLAARSGLRVGDRILAVNGQDVRDATHQEAVSALLRPCLELSLLVRRDPAPPGLRELCIQKAPGERLGISIRGGARGHAGNPRDPTDEGIFISKVSPTGAAGRDGRLRVGLRLLEVNQQSLLGLTHGEAVQLLRSVGDTLTVLVCDGFEASTDAALEVSPGVIANPFAAGIGHRNSLESISSIDRELSPEGPGKEKELPGQTLHWGPEATEAAGRGLQPLKLDYRALAAVPSAGSVQRVPSGAAGGKMAESPCSPSGQQPPSPPSPDELPANVKQAYRAFAAVPTSHPPEDAPAQPPTPGPAASPEQLSFRERQKYFELEVRVPQAEGPPKRVSLVGADDLRKMQEEEARKLQQKRAQMLREAAEAGAEARLALDGETLGEEEQEDEQPPWASPSPTSRQSPASPPPLGGGAPVRTAKAERRHQERLRVQSPEPPAPERALSPAELRALEAEKRALWRAARMKSLEQDALRAQMVLSRSQEGRGTRGPLERLAEAPSPAPTPSPTPVEDLGPQTSTSPGRLSPDFAEELRSLEPSPSPGPQEEDGEVALVLLGRPSPGAVGPEDVALCSSRRPVRPGRRGLGPVPS

SEQ ID NO: 3862 - protein, 1655 aa, Homo sapiens
MLKCIPLWRCNRHVESVDKRHCSLQAVPEEIYRYSRSLEELLLDANQLRELPKPFFRLLNLRKLGLSDNEIQRLPPEVANFMQLVELDVSRNDIPEIPESIKFCKALEIADFSGNPLSRLPDGFTQLRSLAHLALNDVSLQALPGDVGNLANLVTLELRENLLKSLPASLSFLVKLEQLDLGGNDLEVLPDTLGALPNLRELWLDRNQLSALPPELGNLRRLVCLDVSENRLEELPAELGGLVLLTDLLLSQNLLRRLPDGIGQLKQLSILKVDQNRLCEVTEAIGDCENLSELILTENLLMALPRSLGKLTKLTNLNVDRNHLEALPPEIGGCVALSVLSLRDNRLAVLPPELAHTTELHVLDVAGNRLQSLPFALTHLNLKALWLAENQAQPMLRFQTEDDARTGEKVLTCYLLPQQPPLSLEDAGQQGSLSETWSDAPPSRVSVIQFLEAPIGDEDAEEAAAEKRGLQRRATPHPSELKVMKRSIEGRRSEACPCQPDSGSPLPAEEEKRLSAESGLSEDSRPSASTVSEAEPEGPSAEAQGGSQQEATTAGGEEDAEEDYQEPTVHFAEDALLPGDDREIEEGQPEAPWTLPGGRQRLIRKDTPHYKKHFKISKLPQPEAVVALLQGMQPDGEGPVAPGGWHNGPHAPWAPRAQKEEEEEEEGSPQEEEEEEEEENRAEEEEASTEEEDKEGAVVSAPSVKGVSFDQANNLLIEPARIEEEELTLTILRQTGGLGISIAGGKGSTPYKGDDEGIFISRVSEEGPAARAGVRVGDKLLEVNGVALQGAEHHEAVEALRGAGTAVQMRVWRERMVEPENAVTITPLRPEDDYSPRERRGGGLRLPLLPPESPGPLRQRHVACLARSERGLGFSIAGGKGSTPYRAGDAGIFVSRIAEGGAAHRAGTLQVGDRVLSINGVDVTEARHDHAVSLLTAASPTIALLLEREAGGPLPPSPLPHSSPPTAAVATTSITTATPGVPGLPSLAPSLLAAALEGPYPVEEIRLPRAGGPLGLSIVGGSDHSSHPFGVQEPGVFISKVLPRGLAARSGLRVGDRILAVNGQDVRDATHQEAVSALLRPCLELSLLVRRDPAPPGLRELCIQKAPGERLGISIRGGARGHAGNPRDPTDEGIFISKVSPTGAAGRDGRLRVGLRLLEVNQQSLLGLTHGEAVQLLRSVGDTLTVLVCDGFEASTDAALEVSPGVIANPFAAGIGHRNSLESISSIDRELSPEGPGKEKELPGQTLHWGPEATEAAGRGLQPLKLDYRALAAVPSAGSVQRVPSGAAGGKMAESPCSPSGQQPPSPPSPDELPANVKQAYRAFAAVPTSHPPEDAPAQPPTPGPAASPEQLSFRERQKYFELEVRVPQAEGPPKRVSLVGADDLRKMQEEEARKLQQKRAQMLREAAEAGAEARLALDGETLGEEEQEDEQPPWASPSPTSRQSPASPPPLGGGAPVRTAKAERRHQERLRVQSPEPPAPERALSPAELRALEAEKRALWRAARMKSLEQDALRAQMVLSRSQEGRGTRGPLERLAEAPSPAPTPSPTPVEDLGPQTSTSPGRLPLSGKKFDYRAFAALPSSRPVYDIQSPDFAEELRSLEPSPSPGPQEEDGEVALVLLGRPSPGAVGPEDVALCSSRRPVRPGRRGLGPVPS

SEQ ID NO: 3863 - protein, 243 aa, Homo sapiens [sequence omitted]

SEQ ID NO: 3864 - protein, 528 aa, Homo sapiens
MASMRESDTGLWLHNKLGATDELWAPPSIASLLTAAVIDNIRLCFHGLSSAVKLKLLLGTLHLPRRTVDEMKGALMEIIQLASLDSDPWVLMVADILKSFPDTGSLNLELEEQNPNVQDILGELREKVGECEASAMLPLECQYLNKNALTTLAGPLTPPVKHFQLKRKPKSATLRAELLQKSTETAQQLKRSAGVPFHAKGRGLLRKMDTTTPLKGIPKQAPFRSPTAPSVFSPTGNRTPIPPSRTLLRKERGVKLLDISELDMVGAGREAKRRRKTLDAEVVEKPAKEETVVENATPDYAAGLVSTQKLGSLNNEPALPSTSYLPSTPSVVPASSYIPSSETPPAPSSREASRPPEEPSAPSPTLPAQFKQRAPMYNSGLSPATPTPAAPTSPLTPTTPPAVAPTTQTPPVAMVAPQTQAPAQQQPKKNLSLTREQMFAAQEMFKTANKVTRPEKALILGFMAGSRENPCQEQGDVIQIKLSEHTEDLPKADGQGSTTMLVDTVFEMNYATGQWTRFKKYKPMTNVS

SEQ ID NO: 3865 - protein, 2146 aa, Homo sapiens
MAFWTQLMLLLWKNFMYRRRQPVQLLVELLWPLFLFFILVAVRHSHPPLEHHECHFPNKPLPSAGTVPWLQGLICNVNNTCFPQLTPGEEPGRLSNFNDSLVSRLLADARTVLGGASAHRTLAGLGKLIATLRAARSTAQPQPTKQSPLEPPMLDVAELLTSLLRTESLGLALGQAQEPLHSLLEAAEDLAQELLALRSLVELRALLQRPRGTSGPLELLSEALCSVRGPSSTVGPSLNWYEASDLMELVGQEPESALPDSSLSPACSELIGALDSHPLSRLLWRRLKPLILGKLLFAPDTPFTRKLMAQVNRTFEELTLLRDVREVWEMLGPRIFTFMNDSSNVAMLQRLLQMQDEGRRQPRPGGRDHMEALRSFLDPGSGGYSWQDAHADVGHLVGTLGRVTECLSLDKLEAAPSEAALVSRALQLLAEHRFWAGVVFLGPEDSSDPTEHPTPDLGPGHVRIKIRMDIDVVTRTNKIRDRFWDPGPAADPLTDLRYVWGGFVYLQDLVERAAVRVLSGANPRAGLYLQQMPYPCYVDDVFLRVLSRSLPLFLTLAWIYSVTLTVKAVVREKETRLRDTMRAMGLSRAVLWLGWFLSCLGPFLLSAALLVLVLKLGDILPYSHPGVVFLFLAAFAVATVTQSFLLSAFFSRANLAAACGGLAYFSLYLPYVLCVAWRDRLPAGGRVAASLLSPVAFGFGCESLALLEEQGEGAQWHNVGTRPTADVFSLAQVSGLLLLDAALYGLATWYLEAVCPGQYGIPEPWNFPFRRSYWCGPRPPKSPAPCPTPLDPKVLVEEAPPGLSPGVSVRSLEKRFPGSPQPALRGLSLDFYQGHITAFLGHNGAGKTTTLSILSGLFPPSGGSAFILGHDVRSSMAAIRPHLGVCPQYNVLFDMLTVDEHVWFYGRLKGLSAAVVGPEQDRLLQDVGLVSKQSVQTRHLSGGMQRKLSVAIAFVGGSQVVILDEPTAGVDPASRRGIWELLLKYREGRTLILSTHHLDEAELLGDRVAVVAGGRLCCCGSPLFLRRHLGSGYYLTLVKARLPLTTNEKADTDMEGSVDTRQEKKNGSQGSRVGTPQLLALVQHWVPGARLVEELPHELVLVLPYTGAHDGSFATLFRELDTRLAELRLTGYGISDTSLEEIFLKVVEECAADTDMEDGSCGQHLCTGIAGLDVTLRLKMPPQETALENGEPAGSAPETDQGSGPDAVGRVQGWALTRQQLQALLLKRFLLARRSRRGLFAQIVLPALFVGLALVFSLIVPPFGHYPALRLSPTMYGAQVSFFSEDAPGDPGRARLLEALLQEAGLEEPPVQHSSHRFSAPEVPAEVAKVLASGNWTPESPSPACQCSQPGARRLLPDCPAAAGGPPPPQAVTGSGEVVQNLTGRNLSDFLVKTYPRLVRQGLKTKKWVNEVRYGGFSLGGRDPGLPSGQELGRSVEELWALLSPLPGGALDRVLKNLTAWAHSLDAQDSLKIWFNNKGWHSMVAFVNRASNAILRAHLPPGRARHAHSITTLNHPLNLTKEQLFEAALMASSVDVLVSICVVFAMSFVPASFTLVLIEERVTRAKHLQLMGGLSPTLYWLGNFLWDMCNYLVPACIVVLIFLAFQQRAYVAPANLPALLLLLLLYGWSITPLMYPASFFFSVPSTAYVVLTCINLFIGINGSMATFVLELFSDQKLQEVSRILKQVFLIFPHFCLGRGLIDMVRNQAMADAFERLGDRQFQSPLRWEVVGKNLLAMVIQGPLFLLFTLLLQHRSQLLPQPRVRSLPLLGEEDEDVARERERVVQGATQGDVLVLRNLTKVYRGQRMPAVDRLCLGIPPGECFGLLGVNGAGKTSTFRMVTGDTLASRGEAVLAGHSVAREPSAAHLSMGYCPQSDAIFELLTGREHLELLARLRGVPEAQVAQTAGSGLARLGLSWYADRPAGTYSGGNKRKLATALALVGDPAVVFLDEPTTGMDPSARRFLWNSLLAVVREGRSVMLTSHSMEECEALCSRLAIMVNGRFRCLGSPQHLKGRFAAGHTLTLRVPAARSQPAAAFVAAEFPGSELREAHGGRLRFQLPPGGRCALARVFGELAVHGAEHGVEDFSVSQTMLEEVFLYFSKDQGKDEDTEEQKEAGVGVDPAPGLQHPKRVSQFLDDPSTAETVL

SEQ ID NO: 3866 - protein, 2008 aa, Homo sapiens
MVCLGTGQSAGPLVSVQNHCPPCGLSPQESLGLALGQAQEPLHSLLEAAEDLAQELLALRSLVELRALLQRPRGTSGPLELLSEALCSVRGPSSTVGPSLNWYEASDLMELVGQEPESALPDSSLSPACSELIGALDSHPLSRLLWRRLKPLILGKLLFAPDTPFTRKLMAQVNRTFEELTLLRDVREVWEMLGPRIFTFMNDSSNVAMLQRLLQMQDEGRRQPRPGGRDHMEALRSFLDPGSGGYSWQDAHADVGHLVGTLGRVTECLSLDKLEAAPSEAALVSRALQLLAEHRFWAGVVFLGPEDSSDPTEHPTPDLGPGHVRIKIRMDIDVVTRTNKIRDRFWDPGPAADPLTDLRYVWGGFVYLQDLVERAAVRVLSGANPRAGLYLQQMPYPCYVDDVFLRVLSRSLPLFLTLAWIYSVTLTVKAVVREKETRLRDTMRAMGLSRAVLWLGWFLSCLGPFLLSAALLVLVLKLGDILPYSHPGVVFLFLAAFAVATVTQSFLLSAFFSRANLAAACGGLAYFSLYLPYVLCVAWRDRLPAGGRVAASLLSPVAFGFGCESLALLEEQGEGAQWHNVGTRPTADVFSLAQVSGLLLLDAALYGLATWYLEAVCPGQYGIPEPWNFPFRRSYWCGPRPPKSPAPCPTPLDPKVLVEEAPPGLSPGVSVRSLEKRFPGSPQPALRGLSLDFYQGHITAFLGHNGAGKTTTLSILSGLFPPSGGSAFILGHDVRSSMAAIRPHLGVCPQYNVLFDMLTVDEHVWFYGRLKGLSAAVVGPEQDRLLQDVGLVSKQSVQTRHLSGGMQRKLSVAIAFVGGSQVVILDEPTAGVDPASRRGIWELLLKYREGRTLILSTHHLDEAELLGDRVAVVAGGRLCCCGSPLFLRRHLGSGYYLTLVKARLPLTTNEKADTDMEGSVDTRQEKKNGSQGSRVGTPQLLALVQHWVPGARLVEELPHELVLVLPYTGAHDGSFATLFRELDTRLAELRLTGYGISDTSLEEIFLKVVEECAADTDMEDGSCGQHLCTGIAGLDVTLRLKMPPQETALENGEPAGSAPETDQGSGPDAVGRVQGWALTRQQLQALLLKRFLLARRSRRGLFAQIVLPALFVGLALVFSLIVPPFGHYPALRLSPTMYGAQVSFFSEDAPGDPGRARLLEALLQEAGLEEPPVQHSSHRFSAPEVPAEVAKVLASGNWTPESPSPACQCSQPGARRLLPDCPAAAGGPPPPQAVTGSGEVVQNLTGRNLSDFLVKTYPRLVRQGLKTKKWVNEVRYGGFSLGGRDPGLPSGQELGRSVEELWALLSPLPGGALDRVLKNLTAWAHSLDAQDSLKIWFNNKGWHSMVAFVNRASNAILRAHLPPGRARHAHSITTLNHPLNLTKEQLFEAALMASSVDVLVSICVVFAMSFVPASFTLVLIEERVTRAKHLQLMGGLSPTLYWLGNFLWDMCNYLVPACIVVLIFLAFQQRAYVAPANLPALLLLLLLYGWSITPLMYPASFFFSVPSTAYVVLTCINLFIGINGSMATFVLELFSDQKLQEVSRILKQVFLIFPHFCLGRGLIDMVRNQAMADAFERLGDRQFQSPLRWEVVGKNLLAMVIQGPLFLLFTLLLQHRSQLLPQPRVRSLPLLGEEDEDVARERERVVQGATQGDVLVLRNLTKVYRGQRMPAVDRLCLGIPPGECFGLLGVNGAGKTSTFRMVTGDTLASRGEAVLAGHSVAREPSAAHLSMGYCPQSDAIFELLTGREHLELLARLRGVPEAQVAQTAGSGLARLGLSWYADRPAGTYSGGNKRKLATALALVGDPAVVFLDEPTTGMDPSARRFLWNSLLAVVREGRSVMLTSHSMEECEALCSRLAIMVNGRFRCLGSPQHLKGRFAAGHTLTLRVPAARSQPAAAFVAAEFPGSELREAHGGRLRFQLPPGGRCALARVFGELAVHGAEHGVEDFSVSQTMLEEVFLYFSKDQGKDEDTEEQKEAGVGVDPAPGLQHPKRVSQFLDDPSTAETVL

SEQ ID NO: 3867 - protein, 540 aa, Homo sapiens
MDSVAFEDVDVNFTQEEWALLDPSQKNLYRDVMWETMRNLASIGKKWKDQNIKDHYKHRGRNLRSHMLERLYQTKDGSQRGGIFSQFANQNLSKKIPGVKLCESIVYGEVSMGQSSLNRHIKDHSGHEPKEYQEYGEKPDTRNQCWKPFSSHHSFRTHEIIHTGEKLYDCKECGKTFFSLKRIRRHIITHSGYTPYKCKVCGKAFDYPSRFRTHERSHTGEKPYECQECGKAFTCITSVRRHMIKHTGDGPYKCKVCGKPFHSLSSFQVHERIHTGEKPFKCKQCGKAFSCSPTLRIHERTHTGEKPYECKQCGKAFSYLPSLRLHERIHTGEKPFVCKQCGKAFRSASTFQIHERTHTGEKPYECKECGEAFSCIPSMRRHMIKHTGEGPYKCKVCGKPFHSLSPFRIHERTHTGEKPYVCKHCGKAFVSSTSIRIHERTHTGEKPYECKQCGKAFSYLNSFRTHEMIHTGEKPFECKRCGKAFRSSSSFRLHERTHTGQKPYHCKECGKAYSCRASFQRHMLTHAEDGPPYKCMWESL

SEQ ID NO: 3868 - protein, 1042 aa, Homo sapiens
MELQKGKGAAAAAAASGAAGGGGGGAGAGAPGGGRLLLSTSLDAKDELEERLERCMSIVTSMTAGVSEREANDALNAYVCKGLPQHEEICLGLFTLILTEPAQAQKCYRDLALVSRDGMNIVLNKINQILMEKYLKLQDTCRTQLVWLVRELVKSGVLGADGVCMTFMKQIAGGDVTAKNIWLAESVLDILTEQREWVLKSSILIAMAVYTYLRLIVDHHGTAQLQALRQKEVDFCISLLRERFMECLMIGRDLVRLLQNVARIPEFELLWKDIIHNPQALSPQFTGILQLLQSRTSRKFLACRLTPDMETKLLFMTSRVRFGQQKRYQDWFQRQYLSTPDSQSLRCDLIRYICGVVHPSNEVLSSDILPRWAIIGWLLTTCTSNVAASNAKLALFYDWLFFSPDKDSIMNIEPAILVMHHSMKPHPAITATLLDFMCRIIPNFYPPLEGHVRQGVFSSLNHIVEKRVLAHLAPLFDNPKLDKELRAMLREKFPEFCSSPSPPVEVKIEEPVSMEMDNHMSDKDESCYDNAEAAFSDDEEDLNSKGKKREFRFHPIKETVVEEPVDITPYLDQLDESLRDKVLQLQKGSDTEAQCEVMQEIVDQVLEEDFDSEQLSVLASCLQELFKAHFRGEVLPEEITEESLEESVGKPLYLIFRNLCQMQEDNSSFSLLLDLLSELYQKQPKIGYHLLYYLRASKAAAGKMNLYESFAQATQLGDLHTCLMMDMKACQEDDVRLLCHLTPSIYTEFPDETLRSGELLNMIVAVIDSAQLQELVCHVMMGNLVMFRKDSVLNILIQSLDWETFEQYCAWQLFLAHNIPLETIIPILQHLKYKEHPEALSCLLLQLRREKPSEEMVKMVLSRPCHPDDQFTTSILRHWCMKHDELLAEHIKSLLIKNNSLPRKRQSLRSSSSKLAQLTLEQILEHLDNLRLNLTNTKQNFFSQTPILQALQHVQASCDEAHKMKFSDLFSLAEEYEDSSTKPPKSRRKAALSSPRSRKNATQPPNAEEESGSSSASEEEDTKPKPTKRKRKGSSAVGSDSD

SEQ ID NO: 3869 - protein, 242 aa, Homo sapiens
MAAALWGFFPVLLLLLLSGDVQSSEVPGAAAEGSGGSGVGIGDRFKIEGRAVVPGVKPQDWISAARVLVDGEEHVGFLKTDGSFVVHDIPSGSYVVEVVSPAYRFDPVRVDITSKGKMRARYVNYIKTSEVVRLPYPLQMKSSGPPSYFIKRESWGWTDFLMNPMVMMMVLPLLIFVLLPKVVNTSDPDMRREMEQSMNMLNSNHELPDVSEFMTRLFSSKSSGKSSSGSSKTGKSGAGKRR

SEQ ID NO: 3870 - protein, 615 aa, Homo sapiens
MGLKAAQKTLFPLRSIDDVVRLFAAELGREEPDLVLLSLVLGFVEHFLAVNRVIPTNVPELTFQPSPAPDPPGGLTYFPVADLSIIAALYARFTAQIRGAVDLSLYPREGGVSSRELVKKVSDVIWNSLSRSYFKDRAHIQSLFSFITGWSPVGTKLDSSGVAFAVVGACQALGLRDVHLALSEDHAWVVFGPNGEQTAEVTWHGKGNEDRRGQTVNAGVAERSWLYLKGSYMRCDRKMEVAFMVCAINPSIDLHTDSLELLQLQQKLLWLLYDLGHLERYPMALGNLADLEELEPTPGRPDPLTLYHKGIASAKTYYRDEHIYPYMYLAGYHCRNRNVREALQAWADTATVIQDYNYCREDEEIYKEFFEVANDVIPNLLKEAASLLEAGEERPGEQSQGTQSQGSALQDPECFAHLLRFYDGICKWEEGSPTPVLHVGWATFLVQSLGRFEGQVRQKVRIVSREAEAAEAEEPWGEEAREGRRRGPRRESKPEEPPPPKKPALDKGLGTGQGAVSGPPRKPPGTVAGTARGPEGGSTAQVPAPAASPPPEGPVLTFQSEKMKGMKELLVATKINSSAIKLQLTAQSQVQMKKQKVSTPSDYTLSFLKRQRKGL

SEQ ID NO: 3871 - protein, 610 aa, Homo sapiens
MGLKAAQKTLFPLRSIDDVVRLFAAELGREEPDLVLLSLVLGFVEHFLAVNRVIPTNVPELTFQPSPAPDPPGGLTYFPVADLSIIAALYARFTAQIRGAVDLSLYPREGGVSSRELVKKVSDVIWNSLSRSYFKDRAHIQSLFSFITGTKLDSSGVAFAVVGACQALGLRDVHLALSEDHAWVVFGPNGEQTAEVTWHGKGNEDRRGQTVNAGVAERSWLYLKGSYMRCDRKMEVAFMVCAINPSIDLHTDSLELLQLQQKLLWLLYDLGHLERYPMALGNLADLEELEPTPGRPDPLTLYHKGIASAKTYYRDEHIYPYMYLAGYHCRNRNVREALQAWADTATVIQDYNYCREDEEIYKEFFEVANDVIPNLLKEAASLLEAGEERPGEQSQGTQSQGSALQDPECFAHLLRFYDGICKWEEGSPTPVLHVGWATFLVQSLGRFEGQVRQKVRIVSREAEAAEAEEPWGEEAREGRRRGPRRESKPEEPPPPKKPALDKGLGTGQGAVSGPPRKPPGTVAGTARGPEGGSTAQVPAPAASPPPEGPVLTFQSEKMKGMKELLVATKINSSAIKLQLTAQSQVQMKKQKVSTPSDYTLSFLKRQRKGL

SEQ ID NO: 3872 - protein, 615 aa, Homo sapiens; identical to SEQ ID NO: 3870

SEQ ID NO: 3873 - protein, 615 aa, Homo sapiens; identical to SEQ ID NO: 3870

SEQ ID NO: 3874 - protein, 615 aa, Homo sapiens; identical to SEQ ID NO: 3870

SEQ ID NO: 3875 - protein, 615 aa, Homo sapiens; identical to SEQ ID NO: 3870

SEQ ID NO: 3876 - protein, 615 aa, Homo sapiens; identical to SEQ ID NO: 3870

SEQ ID NO: 3877 - protein, 2969 aa, Homo sapiens
MDPRNTAMLGLGSDSEGFSRKSPSAISTGTLVSKREVELEKNTKEEEDLRKRNRERNIEAGKDDGLTDAQQQFSVKETNFSEGNLKLKIGLQAKRTKKPPKNLENYVCRPAIKTTIKHPRKALKSGKMTDEKNEHCPSKRDPSKLYKKADDVAAIECQSEEVIRLHSQGENNPLSKKLSPVHSEMADYINATPSTLLGSRDPDLKDRALLNGGTSVTEKLAQLIATCPPSKSSKTKPKKLGTGTTAGLVSKDLIRKAGVGSVAGIIHKDLIKKPTISTAVGLVTKDPGKKPVFNAAVGLVNKDSVKKLGTGTTAVFINKNLGKKPGTITTVGLLSKDSGKKLGIGIVPGLVHKESGKKLGLGTVVGLVNKDLGKKLGSTVGLVAKDCAKKIVASSAMGLVNKDIGKKLMSCPLAGLISKDAINLKAEALLPTQEPLKASCSTNINNQESQELSESLKDSATSKTFEKNVVRQNKESILEKFSVRKEIINLEKEMFNEGTCIQQDSFSSSEKGSYETSKHEKQPPVYCTSPDFKMGGASDVSTAKSPFSAVGESNLPSPSPTVSVNPLTRSPPETSSQLAPNPLLLSSTTELIEEISESVGKNQFTSESTHLNVGHRSVGHSISIECKGIDKEVNDSKTTHIDIPRISSSLGKKPSLTSESSIHTITPSVVNFTSLFSNKPFLKLGAVSASDKHCQVAESLSTSLQSKPLKKRKGRKPRWTKVVARSTCRSPKGLELERSELFKNVSCSSLSNSNSEPAKFMKNIGPPSFVDHDFLKRRLPKLSKSTAPSLALLADSEKPSHKSFATHKLSSSMCVSSDLLSDIYKPKRGRPKSKEMPQLEGPPKRTLKIPASKVFSLQSKEEQEPPILQPEIEIPSFKQGLSVSPFPKKRGRPKRQMRSPVKMKPPVLSVAPFVATESPSKLESESDNHRSSSDFFESEDQLQDPDDLDDSHRPSVCSMSDLEMEPDKKITKRNNGQLMKTIIRKINKMKTLKRKKLLNQILSSSVESSNKGKVQSKLHNTVSSLAATFGSKLGQQINVSKKGTIYIGKRRGRKPKTVLNGILSGSPTSLAVLEQTAQQAAGSALGQILPPLLPSSASSSEILPSPICSQSSGTSGGQSPVSSDAGFVEPSSVPYLHLHSRQGSMIQTLAMKKASKGRRRLSPPTLLPNSPSHLSELTSLKEATPSPISESHSDETIPSDSGIGTDNNSTSDRAEKFCGQKKRRHSFEHVSLIPPETSTVLSSLKEKHKHKCKRRNHDYLSYDKMKRQKRKRKKKYPQLRNRQDPDFIAELEELISRLSEIRITHRSHHFIPRDLLPTIFRINFNSFYTHPSFPLDPLHYIRKPDLKKKRGRPPKMREAMAEMPFMHSLSFPLSSTGFYPSYGMPYSPSPLTAAPIGLGYYGRYPPTLYPPPPSPSFTTPLPPPSYMHAGHLLLNPAKYHKKKHKLLRQEAFLTTSRTPLLSMSTYPSVPPEMAYGWMVEHKHRHRHKHREHRSSEQPQVSMDTGSSRSVLESLKRYRFGKDAVGERYKHKEKHRCHMSCPHLSPSKSLINREEQWVHREPSESSPLALGLQTPLQIDCSESSPSLSLGGFTPNSEPASSDEHTNLFTSAIGSCRVSNPNSSGRKKLTDSPGLFSAQDTSLNRLHRKESLPSNERAVQTLAGSQPTSDKPSQRPSESTNCSPTRKRSSSESTSSTVNGVPSRSPRLVASGDDSVDSLLQRMVQNEDQEPMEKSIDAVIATASAPPSSSPGRSHSKDRTLGKPDSLLVPAVASDSCNNSISLLSEKLTSSCSPHHIKRSVVEAMQRQARKMCNYDKILATKKNLDHVNKILKAKKLQRQARTGNNFVKRRPGRPRKCPLQAVVSMQAFQAAQFVNPELNRDEEGAALHLSPDTVTDVIEAVVQSVNLNPEHKKGLKRKGWLLEEQTRKKQKPLPEEEEQENNKSFNEAPVEIPSPSETPAKPSEPESTLQPVLSLIPREKKPPRPPKKKYQKAGLYSDVYKTTDPKSRLIQLKKEKLEYTPGEHEYGLFPAPIHVVFFVSGKYLRQKRIDFQLPYDILWQWKHNQLYKKPDVPLYKKIRSNVYVDVKPLSGYEATTCNCKKPDDDTRKGCVDDCLNRMIFAECSPNTCPCGEQCCNQRIQRHEWVQCLERFRAEEKGWGIRTKEPLKAGQFIIEYLGEVVSEQEFRNRMIEQYHNHSDHYCLNLDSGMVIDSYRMGNEARFINHSCDPNCEMQKWSVNGVYRIGLYALKDMPAGTELTYDYNFHSFNVEKQQLCKCGFEKCRGIIGGKSQRVNGLTSSKNSQPMATHKKSGRSKEKRKSKHKLKKRRGHLSEEPSENINTPTRLTPQLQMKPMSNRERNFVLKHHVFLVRNWEKIRQKQEEVKHTSDNIHSASLYTRWNGICRDDGNIKSDVFMTQFSALQTARSVRTRRLAAAEENIEVARAARLAQIFKEICDGIISYKDSSRQALAAPLLNLPPKKKNADYYEKISDPLDLITIEKQILTGYYKTVEAFDADMLKVFRNAEKYYGRKSPVGRDVCRLRKAYYNARHEASAQIDEIVGETASEADSSETSVSEKENGHEKDDDVIRCICGLYNDEGLMIQCDKCMVWQHCDCMGVNSDVEHYLCEQCDPRPVDREVPMIPRPHYAQPGCVYFICLLRDDLLLRQGDCVYLMRDSRRTPDGHPVRQSYRLLSHINRHKLDIFRIEKLWKNEKEERFAFGHHYFRPHETHHSPSRRFYHNELFRVPLYEIIPLEAVVGTCCVLDLYTYCKGRPKGVKEQDVYICDYRLDKSAHLFYKIHRNRYPVCTKPYAFDHFPKKLTPKKDFSPHYVPDNYKRNGGRSSWKSERSKPPLKDLGQEDDALPLIEEVLASQEQAANEIPSLEEPEREGATANVSEGEKKTEESSQEPQSTCTPEERRHNQRERLNQILLNLLEKIPGKNAIDVTYLLEEGSGRKLRRRTLFIPENSFRK

SEQ ID NO: 3878 - protein, 465 aa, Homo sapiens
MEEEDEEARALLAGGPDEADRGAPAAPGALPALCDPSRLAHRLLVLLLMCFLGFGSYFCYDNPAALQTQVKRDMQVNTTKFMLLYAWYSWPNVVLCFFGGFLIDRVFGIRWGTIIFSCFVCIGQVVFALGGIFNAFWLMEFGRFVFGIGGESLAVAQNTYAVSWFKGKELNLVFGLQLSMARIGSTVNMNLMGWLYSKIEALLGSAGHTTLGITLMIGGVTCILSLICALALAYLDQRAERILHKEQGKTGEVIKLTDVKDFSLPLWLIFIICVCYYVAVFPFIGLGKVFFTEKFGFSSQAASAINSVVYVISAPMSPVFGLLVDKTGKNIIWVLCAVAATLVSHMMLAFTMWNPWIAMCLLGLSYSLLACALWPMVAFVVPEHQLGTAYGFMQSIQNLGLAIISIIAGMILDSRGYLFLEVFFIACVSLSLLSVVLLYLVNRAQGGNLNYSARQREEIKFSHTE

SEQ ID NO: 3879 - protein, 718 aa, Homo sapiens
MLMTLEMTELTDPHHTMGDYKVAHPQDPHHPSEKPVIHCHKCGEPCKGEVLRVQTKHFHIKCFTCKVCGCDLAQGGFFIKNGEYLCTLDYQRMYGTRCHGCGEFVEGEVVTALGKTYHPNCFACTICKRPFPPGDRVTFNGRDCLCQLCAQPMSSSPKETTFSSNCAGCGRDIKNGQALLALDKQWHLGCFKCKSCGKVLTGEYISKDGAPYCEKDYQGLFGVKCEACHQFITGKVLEAGDKHYHPSCARCSRCNQMFTEGEEMYLQGSTVWHPDCKQSTKTEEKLRPTRTSSESIYSRPGSSIPGSPGHTIYAKVDNEILDYKDLAAIPKVKAIYDIERPDLITYEPFYTSGYDDKQERQSLGESPRTLSPTPSAEGYQDVRDRMIHRSTSQGSINSPVYSRHSYTPTTSRSPQHFHRPGNEPSSGRNSPLPYRPDSRPLTPTYAQAPKHFHVPDQGINIYRKPPIYKQHAALAAQSKSSEDIIKFSKFPAAQAPDPSETPKIETDHWPGPPSFAVVGPDMKRRSSGREEDDEELLRRRQLQEEQLMKLNSGLGQLILKEEMEKESRERSSLLASRYDSPINSASHIPSSKTASLPGYGRNGLHRPVSTDFAQYNSYGDVSGGVRDYQTLPDGHMPAMRMDRGVSMPNMLEPKIFPYEMLMVTNRGRNKILREVDRTRLERHLAPEVFREIFGMSIQEFDRLPLWRRNDMKKKAKLF

SEQ ID NO: 3880 - protein, 746 aa, Homo sapiens
MLMTLEMTELTDPHHTMGDYKVAHPQDPHHPSEKPVIHCHKCGEPCKGEVLRVQTKHFHIKCFTCKVCGCDLAQGGFFIKNGEYLCTLDYQRMYGTRCHGCGEFVEGEVVTALGKTYHPNCFACTICKRPFPPGDRVTFNGRDCLCQLCAQPMSSSPKETTFSSNCAGCGRDIKNGQALLALDKQWHLGCFKCKSCGKVLTGEYISKDGAPYCEKDYQGLFGVKCEACHQFITGKVLEAGDKHYHPSCARCSRCNQMFTEGEEMYLQGSTVWHPDCKQSTKTEEKLRLPNIRRSSSDFFYSKSLIRRTGRSPSLQPTRTSSESIYSRPGSSIPGSPGHTIYAKVDNEILDYKDLAAIPKVKAIYDIERPDLITYEPFYTSGYDDKQERQSLGESPRTLSPTPSAEGYQDVRDRMIHRSTSQGSINSPVYSRHSYTPTTSRSPQHFHRPGNEPSSGRNSPLPYRPDSRPLTPTYAQAPKHFHVPDQGINIYRKPPIYKQHAALAAQSKSSEDIIKFSKFPAAQAPDPSETPKIETDHWPGPPSFAVVGPDMKRRSSGREEDDEELLRRRQLQEEQLMKLNSGLGQLILKEEMEKESRERSSLLASRYDSPINSASHIPSSKTASLPGYGRNGLHRPVSTDFAQYNSYGDVSGGVRDYQTLPDGHMPAMRMDRGVSMPNMLEPKIFPYEMLMVTNRGRNKILREVDRTRLERHLAPEVFREIFGMSIQEFDRLPLWRRNDMKKKAKLF

SEQ ID NO: 3881 - protein, 778 aa, Homo sapiens
MPAFLGLKCLGKLCSSEKSKVTSSERTSARGSNRKRLIVEDRRVSGTSFTAHRRATITHLLYLCPKDYCPRGRVCNSVDPFVAHPQDPHHPSEKPVIHCHKCGEPCKGEVLRVQTKHFHIKCFTCKVCGCDLAQGGFFIKNGEYLCTLDYQRMYGTRCHGCGEFVEGEVVTALGKTYHPNCFACTICKRPFPPGDRVTFNGRDCLCQLCAQPMSSSPKETTFSSNCAGCGRDIKNGQALLALDKQWHLGCFKCKSCGKVLTGEYISKDGAPYCEKDYQGLFGVKCEACHQFITGKVLEAGDKHYHPSCARCSRCNQMFTEGEEMYLQGSTVWHPDCKQSTKTEEKLRPTRTSSESIYSRPGSSIPGSPGHTIYAKVDNEILDYKDLAAIPKVKAIYDIERPDLITYEPFYTSGYDDKQERQSLGESPRTLSPTPSAEGYQDVRDRMIHRSTSQGSINSPVYSRHSYTPTTSRSPQHFHRPGNEPSSGRNSPLPYRPDSRPLTPTYAQAPKHFHVPDQGINIYRKPPIYKQHAALAAQSKSSEDIIKFSKFPAAQAPDPSETPKIETDHWPGPPSFAVVGPDMKRRSSGREEDDEELLRRRQLQEEQLMKLNSGLGQLILKEEMEKESRERSSLLASRYDSPINSASHIPSSKTASLPGYGRNGLHRPVSTDFAQYNSYGDVSGGVRDYQTLPDGHMPAMRMDRGVSMPNMLEPKIFPYEMLMVTNRGRNKILREVDRTRLERHLAPEVFREIFGMSIQEFDRLPLWRRNDMKKKAKLF

SEQ ID NO: 3882 - protein, 455 aa, Homo sapiens
MFTEGEEMYLQGSTVWHPDCKQSTKTEEKLRLPNIRRSSSDFFYSKSLIRRTGRSPSLQPTRTSSESIYSRPGSSIPGSPGHTIYAKVDNEILDYKDLAAIPKVKAIYDIERPDLITYEPFYTSGYDDKQERQSLGESPRTLSPTPSAEGYQDVRDRMIHRSTSQGSINSPVYSRHSYTPTTSRSPQHFHRPDQGINIYRKPPIYKQHAALAAQSKSSEDIIKFSKFPAAQAPDPSETPKIETDHWPGPPSFAVVGPDMKRRSSGREEDDEELLRRRQLQEEQLMKLNSGLGQLILKEEMEKESRERSSLLASRYDSPINSASHIPSSKTASLPGYGRNGLHRPVSTDFAQYNSYGDVSGGVRDYQTLPDGHMPAMRMDRGVSMPNMLEPKIFPYEMLMVTNRGRNKILREVDRTRLERHLAPEVFREIFGMSIQEFDRLPLWRRNDMKKKAKLF

SEQ ID NO: 3883 - protein, 1523 aa, Homo sapiens
MTSVWKRLQRVGKRAAKFQFVACYHELVLECTKKWQPDKLVVVWTRRNRRICSKAHSWQPGIQNPYRGTVVWMVPENVDISVTLYRDPHVDQYEAKEWTFIIENESKGQRKVLATAEVDLARHAGPVPVQVPVRLRLKPKSVKVVQAELSLTLSGVLLREGRATDDDMQSLASLMSVKPSDVGNLDDFAESDEDEAHGPGAPEARARVPQPDPSRELKTLCEEEEEGQGRPQQAVASPSNAEDTSPAPVSAPAPPARTSRGQGSERANEAGGQVGPEAPRPPETSPEMRSSRQPAQDTAPTPAPRLRKGSDALRPPVPQGEDEVPKASGAPPAGLGSARETQAQACPQEGTEAHGARLGPSIEDKGSGDPFGRQRLKAEEMDTEDRPEASGVDTEPRSGGREANTKRSGVRAGEAEESSAVCQVDAEQRSKVRHVDTKGPEATGVMPEARCRGTPEAPPRGSQGRLGVRTRDEAPSGLSLPPAEPAGHSGQLGDLEGARAAAGQEREGAEVRGGAPGIEGTGLEQGPSVGAISTRPQVSSWQGALLSTAQGAISRGLGGWEAEAGGSGDLETETEVVGLEVLGTQEKEVEGSGFPETRTLEIEILGALEKEAARSRVLESEVAGTAQCEGLETQETEVGVIETPGTETEVLGTQKTEAGGSGVLQTRTTIAETEVLVTQEISGDLGPLKIEDTIQSEMLGTQETEVEASRVPESEAEGTEAKILGTQEITARDSGVREIEAEIAESDILVAQEIEVGLLGVLGIETGAAEGAILGTQEIASRDSGVPGLEADTTGIQVKEVGGSEVPEIATGTAETEILGTQEIASRSSGVPGLESEVAGAQETEVGGSGISGPEAGMAEARVLMTRKTEIIVPEAEKEEAQTSGVQEAETRVGSALKYEALRAPVTQPRVLGSQEAKAEISGVQGSETQVLRVQEAEAGVWGMSEGKSGAWGAQEAEMKVLESPENKSGTFKAQEAEAGVLGNEKGKEAEGSLTEASLPEAQVASGAGAGAPRASSPEKAEEDRRLPGSQAPPALVSSSQSLLEWCQEVTTGYRGVRITNFTTSWRNGLAFCAILHRFYPDKIDYASLDPLNIKQNNKQAFDGFAALGVSRLLEPADMVLLSVPDKLIVMTYLCQIRAFCTGQELQLVQLEGGGGAGTYRVGSAQPSPPDDLDAGGLAQRLRGHGAEGPQEPKEAADRADGAAPGVASRNAVAGRASKDGGAEAPRESRPAEVPAEGLVNGAGAPGGGGVRLRRPSVNGEPGSVPPPRAHGSFSHVRDADLLKKRRSRLRNSSSFSMDDPDAGAMGAAAAEGQAPDPSPAPGPPTAADSQQPPGGSSPSEEPPPSPGEEAGLQRFQDTSQYVCAELQALEQEQRQIDGRAAEVEMQLRSLMESGANKLQEEVLIQEWFTLVNKKNALIRRQDQLQLLMEEQDLERRFELLSRELRAMLAIEDWQKTSAQQHREQLLLEELVSLVNQRDELVRDLDHKERIALEEDERLERGLEQRRRKLSRQLSRRERCVLS

SEQ ID NO: 3884 - protein, 89 aa, Homo sapiens
MTSVWKRLQRVGKRAAKFQFVACYHELVLECTKKWQPDKLVVVWTRRNRRICSKAHSWQPGIQNPYRGTVVWMVPENVDISVTLYRVSL

SEQ ID NO: 3885 - protein, 43 aa, Homo sapiens
MQLRSLMESGANKLQEEVLIQEWFTLVNKKNALIRRQDQLQLL

SEQ ID NO: 3886 - protein, 43 aa, Homo sapiens; identical to SEQ ID NO: 3885

SEQ ID NO: 3887 - protein, 95 aa, Homo sapiens
MEEQDLERRFELLSRELRAMLAIEDWQKTSAQQHREQLLLEELVSLVNQRDELVRDLDHKERIALEEDERLERGLEQRRRKLSRQLSRRERCVLS

SEQ ID NO: 3888 - protein, 538 aa, Homo sapiens
MRSSRQPAQDTAPTPAPRLRKGSDALRPPVPQGEDEVPKASGAPPAGLGSARETQAQACPQEGTEAHGARLGPSIEDKGSGDPFGRQRLKAEEMDTEDRPEASGVDTEPRSGGREANTKRSGVRAGEAEESSAVCQVDAEQRSKAPPALVSSSQSLLEWCQEVTTGYRGVRITNFTTSWRNGLAFCAILHRFYPDKIDYASLDPLNIKQNNKQAFDGFAALGVSRLLEPADMVLLSVPDKLIVMTYLCQIRAFCTGQELQLVQLEGGGGAGTYRVGSAQPSPPRAHGSFSHVRDADLLKKRRSRLRNSSSFSMDDPDAGAMGAAAAEGQAPDPSPAPGPPTAADSQQPPGGSSPSEEPPPSPGEEAGLQRFQDTSQYVCAELQALEQEQRQIDGRAAEVEMQLRSLMESGANKLQEEVLIQEWFTLVNKKNALIRRQDQLQLLMEEQDLERRFELLSRELRAMLAIEDWQKTSAQQHREQLLLEELVSLVNQRDELVRDLDHKERIALEEDERLERGLEQRRRKLSRQLSRRERCVLS

SEQ ID NO: 3889 - protein, 636 aa, Homo sapiens
MRSSRQPAQDTAPTPAPRLRKGSDALRPPVPQGEDEVPKASGAPPAGLGSARETQAQACPQEGTEAHGARLGPSIEDKGSGDPFGRQRLKAEEMDTEDRPEASGVDTEPRSGGREANTKRSGVRAGEAEESSAVCQVDAEQRSKAPPALVSSSQSLLEWCQEVTTGYRGVRITNFTTSWRNGLAFCAILHRFYPDKIDYASLDPLNIKQNNKQAFDGFAALGVSRLLEPADMVLLSVPDKLIVMTYLCQIRAFCTGQELQLVQLEGGGGAGTYRVGSAQPSPPDDLDAGGLAQRLRGHGAEGPQEPKEAADRADGAAPGVASRNAVAGRASKDGGAEAPRESRPAEVPAEGLVNGAGAPGGGGVRLRRPSVNGEPGSVPPPRAHGSFSHVRDADLLKKRRSRLRNSSSFSMDDPDAGAMGAAAAEGQAPDPSPAPGPPTAADSQQPPGGSSPSEEPPPSPGEEAGLQRFQDTSQYVCAELQALEQEQRQIDGRAAEVEMQLRSLMESGANKLQEEVLIQEWFTLVNKKNALIRRQDQLQLLMEEQDLERRFELLSRELRAMLAIEDWQKTSAQQHREQLLLEELVSLVNQRDELVRDLDHKERIALEEDERLERGLEQRRRKLSRQLSRRERCVLS

SEQ ID NO: 3890 - protein, 565 aa, Homo sapiens [sequence omitted]

SEQ ID NO: 3891 - protein, 1523 aa, Homo sapiens
  VARIANT 1239, 1240, 1241, 1242, 1243, 1244, 1245, 1246, 1247, 1248,1249, 1250, 1251, 1252, 1253: Xaa = Any Amino Acid
MTSVWKRLQRVGKRAAKFQFVACYHELVLECTKKWQPDKLVVVWTRRNRRICSKAHSWQPGIQNPYRGTVVWMVPENVDISVTLYRDPHVDQYEAKEWTFIIENESKGQRKVLATAEVDLARHAGPVPVQVPLRLRLKPKSVKVVQAELSLTLSGVLLREGRATDDDMQSLASLMSVKPSDVGNLDDFAESDEDEAHGPGAPEARARVPQPDPSRELKTLCEEEEEGQGRPQQAVASPSNAEDTSPAPVSAPAPPARTSRGQGSERANEAGGQVGPEAPRPPETSPEMRSSRQPAQDTAPTPAPRLRKGSDALRPPVPQGEDEVPKASGAPPAGLGSARETQAQACPQEGTEAHGARLGPSIEDKGSGDPFGRQRLKAEEMDTEDRPEASGVDTEPRSGGREANTKRSGVRAGEAEESSAVCQVDAEQRSKVRHVDTKGPEATGVMPEARCRGTPEAPPRGSQGRLGVRTRDEAPSGLSLPPAEPAGHSGQLGDLEGARAAAGQEREGAEVRGGAPGIEGTGLEQGPSVGAISTRPQVSSWQGALLSTAQGAISRGLGGWEAEAGGSGVLETETEVVGLEVLGTQEKEVEGSGFPETRTLEIEILGALEKEAARSRVLESEVAGTAQCEGLETQETEVGVIETPGTETEVLGTQKTEAGGSGVLQTRTTIAETEVLVTQEISGDLGPLKIEDTIQSEMLGTQETEVEASRVPESEAEGTEAKILGTQEITARDSGVREIEAEIAESDILVAQEIEVGLLGVLGIETGAAEGAILGTQEIASRDSGVPGLEADTTGIQVKEVGGSEVPEIATGTAETEILGTQEIASRSSGVPGLESEVAGAQETEVGGSGISGPEAGMAEARVLMTRKTEIIVPEAEKEEAQTSGVQEAETRVGSALKYEALRAPVTQPRVLGSQEAKAEISGVQGSETQVLRVQEAEAGVWGMSEGKSGAWGAQEAEMKVLESPENKSGTFKAQEAEAGVLGNEKGKEAEGSLTEASLPEAQVASGAGAGAPRASSPEKAEEDRRLPGSQAPPALVSSSQSLLEWCQEVTTGYRGVRITNFTTSWRNGLAFCAILHRFYPDKIDYASLDPLNIKQNNKQAFDGFAALGVSRLLEPADMVLLSVPDKLIVMTYLCQIRAFCTGQELQLVQLEGGGGAGTYRVGSAQPSPPDDLDAGGLAQRLRGHGAEGPQEPKEAADRADGAAPGVASRNSVAGRASKDGGAEAPRESRPAEVPAEGXXXXXXXXXXXXXXXRRPSVNGEPGSVPPPRAHGSFSHVRDADLLKKRRSRLRNSSSFSMDDPDAGAMGAAAAEGQAPDPSPAPGPPTAADSQQPPGGSSPSEEPPPSPGEEAGLQRFQDTSQYVCAELQALEQEQRQIDGRAAEVEMQLRSLMESGANKLQEEVLIQEWFTLVNKKNALIRRQDQLQLLMEEQDLERRFELLSRELRAMLAIEDWQKTSAQQHREQLLLEELVSLVNQRDELVRDLDHKERIALEEDERLERGLEQRRRKLSRQLSRRERCVLS

SEQ ID NO: 3892 - protein, 89 aa, Homo sapiens; identical to SEQ ID NO: 3884

SEQ ID NO: 3893 - protein, 43 aa, Homo sapiens; identical to SEQ ID NO: 3885

SEQ ID NO: 3894 - protein, 43 aa, Homo sapiens; identical to SEQ ID NO: 3885

SEQ ID NO: 3895 - protein, 95 aa, Homo sapiens; identical to SEQ ID NO: 3887

SEQ ID NO: 3896 - protein, 538 aa, Homo sapiens; identical to SEQ ID NO: 3888

SEQ ID NO: 3897 - protein, 180 aa, Homo sapiens
MASTISAYKEKMKELSVLSLICSCFYTQPHPNTVYQYGDMEVKQLDKRASGQSFEVILKSPSDLSPESPMLSSPPKKKDTSLEELQKRLEAAEERRKTQEAQVLKQLAERREHEREVLHKALEENNNFSRQAEEKLNYKMELSKEIREAHLAALRERLREKELHAAEVRRNKEQREEMSG

SEQ ID NO: 3898 - protein, 418 aa, Homo sapiens
MPMLLPHPHQHFLKGLLRAPFRCYHFIFHSSTHLGSGIPCAQPFNSLGLHCTKWMLLSDGLKRKLCVQTTLKDHTEGLSDKEQRFVDKLYTGLIQGQRACLAEAITLVESTHSRKKELAQVLLQKVLLYHREQEQSNKGKPLAFRVGLSGPPGAGKSTFIEYFGKMLTERGHKLSVLAVDPSSCTSGGSLLGDKTRMTELSRDMNAYIRPSPTRGTLGGVTRTTNEAILLCEGAGYDIILIETVGVGQSEFAVADMVDMFVLLLPPAGGDELQGIKRGIIEMADLVAVTKSDGDLIVPARRIQAEYVSALKLLRKRSQVWKPKVIRISARSGEGISEMWDKMKDFQDLMLASGELTAKRRKQQKVWMWNLIQESVLEHFRTHPTVREQIPLLEQKVLIGALSPGLAADFLLKAFKSRD

SEQ ID NO: 3899 - protein, 208 aa, Homo sapiens
MEAPPVTMMPVTGGTINMMEYLLQGSVLDHSLESLIHRLRGLCDNMEPETFLDHEMVFLLKGQQASPFVLRARRSMDRAGAPWHLRYLGQPEMGDKNRHALVRNCVDIATSENLTDFLMEMGFRMDHEFVAKGHLFRKGIMKIMVYKTFRILVPGNTDSTEALSLSYLVELSVVAPAGQDMVSDDMKNFAEQLKPLVHLEKIDPKRLM

SEQ ID NO: 3900 - protein, 249 aa, Homo sapiens
MFFSAALRARAAGLTAHWGRHVRNLHKTAMQNGAGGALFVHRDTPENNPDTPFDFTPENYKRIEAIVKNYPEGHKAAAVLPVLDLAQRQNGWLPISAMNKVAEVLQVPPMRVYEVATFYTMYNRKPVGKYHIQVCTTTPCMLRNSDSILEAIQKKLGIKVGETTPDKLFTLIEVECLGACVNAPMVQINDNYYEDLTAKDIEEIIDELKAGKIPKPGPRSGRFSCEPAGGLTSLTEPPKGPGFGVQAGL

SEQ ID NO: 3901 - protein, 1557 aa, Homo sapiens
MQNIPFPSPQRPRILVQLSVHDALILSQPVSTPLPLSGANFSTLLMNLGPENCATLLLFVLLESKILLHSLRPAVLTGVAEAVVAMIFPFQWQCPYIPLCPLSLAAVLSAPLPFIVGVDSRYFDLHDPPQDVVCIDLDTNMLYVSDEKKNMNWKQLPKKPCKNLLSTLKKLYPQLSSVHQKTQEGSAIDMTPIEADFSWQKKMTQLEMEIQEAFLRFMASILKGYRTYLRPITEAPSNKATAADSLFDRQGFLKSRDRAYAKFYTLLSKTQIFIRFIEECSFVSDKDTGLAFFDDCIEKLFPDKGTEKTDKVDFDSAEDTRLIELDDSQKGEHTVFIMPPEPPPDDGKDLSPKYSYKYFPRLDLKLFDRPQELKLCFSRHPTGNSITKSPPLMAKRTKQEIKTAHKLAKRCYTNPPQWAKCLFSHCYSLWFICLPAYVRVSHPKVRALQQAYDVLIKMRKTDVDPLDEVCYRVVMQLCGLWGHPVLAVRVLFEMKTARIKPNAITYGYYNKVVLESPWPSSTRSGIFLWTKVRNVVRGLAQFRQPLKKTVQRSQVSSISGGQSDQGYGSKDELIKDDAEIHVPEEQAARELITKTKMQTEEVCDASAIVAKHSQPSPEPHSPTEPPAWGSSIVKVPSGIFDVNSRKSSTGSISNVLFSTQDPVEDAVFGEATNLKKNGDRGEKRQKHFPERSCSFSSESRAGMLLKKSSLDSNSSEMAIMMGADAKILTAALTCPKTSLLHIARTHSFENVSCHLPDSRTCMSESTWNPEHRSSPVPEMLEESQELLEPVVDDVPKTTATVDTYESLLSDSNSNQSRDLKTVSKDLRNKRSSLYGIAKVVQREDVETGLDPLSLLATECTGGKTPDSEDKLFSPVIARNLADEIESYMNLKSPLGSKSSSMELHREENRESGMTTAFIHALERRSSLPLDHGSPAQENPESEKSSPAVSRSKTFTGRFKQQTPSRTHKERSTSLSALVRSSPHGSLGSVVNSLSGLKLDNILSGPKIDVLKSGMKQAATVASKMWVAVASAYSYSDDEEETNRDYSFPAGLEDHILGENISPNTSISGLVPSELTQSNTSLGSSSSSGDVGKLHYPTGEVPFPRGMKGQDFEKSDHGSSQNTSMSSIYQNCAMEVLMSSCSQCRACGALVYDEEIMAGWTADDSNLNTACPFCKSNFLPLLNIEFKDLRGSASFFLKPSTSGDSLQSGSIPLANESLEHKPVSSLAEPDLINFMDFPKHNQIITEETGSAVEPSDEIKRASGDVQTMKISSVPNSLSKRNVSLTRSHSVGGPLQNIDFTQRPFHGISTVSLPNSLQEVVDPLGKRPNPPPVSVPYLSPLVLRKELESLLENEGDQVIHTSSFINQHPIIFWNLVWYFRRLDLPSNLPGLILTSEHCNEGVQLPLSSLSQDSKLVYIQLLWDNINLHQEPREPLYVSWRNFNSEKKSSLLSEEQQETSTLVETIRQSIQHNNVLKPINLLSQQMKPGMKRQRSLYREILFLSLVSLGRENIDIEAFDNEYGIAYNSLSSEILERLQKIDAPPSASVEWCRKCFGAPLI

SEQ ID NO: 3902 - protein, 521 aa, Homo sapiens
MAAEPNKTEIQTLFKRLRAVPTNKACFDCGAKNPSWASITYGVFLCIDCSGVHRSLGVHLSFIRSTELDSNWNWFQLRCMQVGGNANATAFFRQHGCTANDANTKYNSRAAQMYREKIRQLGSAALARHGTDLWIDNMSSAVPNHSPEKKDSDFFTEHTQPPAWDAPATEPSGTQQPAPSTESSGLAQPEHGPNTDLLGTSPKASLELKSSIIGKKKPAAAKKGLGAKKGLGAQKVSSQSFSEIERQAQVAEKLREQQAADAKKQAEESMVASMRLAYQELQIDRKKEEKKLQNLEGKKREQAERLGMGLVSRSSVSHSVLSEMQVIEQETPVSAKSSRSQLDLFDDVGTFASGPPKYKDNPFSLGESFGSRWDTDAAWGMDRVEEKEPEVTISSIRPISERATNRREVESRSSGLESSEARQKFAGAKAISSDMFFGREVDAEYEARSRLQQLSGSSAISSSDLFGDMDGAHGAGSVSLGNVLPTADIAQFKQGVKSVAGKMAVLANGVMNSLQDRYGSY

SEQ ID NO: 3903 - protein, 195 aa, Homo sapiens
MENHKSNNKENITIVDISRKINQLPEAERNLLENGSVYVGLNAALCGLIANSLFRRILNVTKARIAAGLPMAGIPFLTTDLTYRCFVSFPLNTGDLDCETCTITRSGLTGLVIGGLYPVFLAIPVNGGLAARYQSALLPHKGNILSYWIRTSKPVFRKMLFPILLQTMFSAYLGSEQYKLLIKALQLSEPGKEIH

SEQ ID NO: 3904 - protein, 837 aa, Homo sapiens
MLRTAMGLRSWLAAPWGALPPRPPLLLLLLLLLLLQPPPPTWALSPRISLPLGSEERPFLRFEAEHISNYTALLLSRDGRTLYVGAREALFALSSNLSFLPGGEYQELLWGADAEKKQQCSFKGKDPQRDCQNYIKILLPLSGSHLFTCGTAAFSPMCTYINMENFTLARDEKGNVLLEDGKGRCPFDPNFKSTALVVDGELYTGTVSSFQGNDPAISRSQSLRPTKTESSLNWLQDPAFVASAYIPESLGSLQGDDDKIYFFFSETGQEFEFFENTIVSRIARICKGDEGGERVLQQRWTSFLKAQLLCSRPDDGFPFNVLQDVFTLSPSPQDWRDTLFYGVFTSQWHRGTTEGSAVCVFTMKDVQRVFSGLYKEVNRETQQWYTVTHPVPTPRPGACITNSARERKINSSLQLPDRVLNFLKDHFLMDGQVRSRMLLLQPQARYQRVAVHRVPGLHHTYDVLFLGTGDGRLHKAVSVGPRVHIIEELQIFSSGQPVQNLLLDTHRGLLYAASHSGVVQVPMANCSLYRSCGDCLLARDPYCAWSGSSCKHVSLYQPQLATRPWIQDIEGASAKDLCSASSVVSPSFVPTGEKPCEQVQFQPNTVNTLACPLLSNLATRLWLRNGAPVNASASCHVLPTGDLLLVGTQQLGEFQCWSLEEGFQQLVASYCPEVVEDGVADQTDEGGSVPVIISTSRVSAPAGGKASWGADRSYWKEFLVMCTLFVLAVLLPVLFLLYRHRNSMKVFLKQGECASVHPKTCPVVLPPETRPLNGLGPPSTPLDHRGYQSLSDSPPGSRVFTESEKRPLSIQDSFVEVSPVCPRPRVRLGSEIRDSVV

SEQ ID NO: 3905 - protein, 837 aa, Homo sapiens; identical to SEQ ID NO: 3904

SEQ ID NO: 3906 - protein, 316 aa, Homo sapiens
MASTSRLDALPRVTCPNHPDAILVEDYRAGDMICPECGLVVGDRVIDVGSEWRTFSNDKATKDPSRVGDSQNPLLSDGDLSTMIGKGTGAASFDEFGNSKYQNRRTMSSSDRAMMNAFKEITTMADRINLPRNIVDRTNNLFKQVYEQKSLKGRANDAIASACLYIACRQEGVPRTFKEICAVSRISKKEIGRCFKLILKALETSVDLITTGDFMSRFCSNLCLPKQVQMAATHIARKAVELDLVPGRSPISVAAAAIYMASQASAEKRTQKEIGDIAGVADVTIRQSYRLIYPRAPDLFPTDFKFDTPVDKLPQL

SEQ ID NO: 3907 - protein, 1291 aa, Homo sapiens
MAGAASPCANGCGPGAPSDAEVLHLCRSLEVGTVMTLFYSKKSQRPERKTFQVKLETRQITWSRGADKIEGAIDIREIKEIRPGKTSRDFDRYQEDPAFRPDQSHCFVILYGMEFRLKTLSLQATSEDEVNMWIKGLTWLMEDTLQAPTPLQIERWLRKQFYSVDRNREDRISAKDLKNMLSQVNYRVPNMRFLRERLTDLEQRSGDITYGQFAQLYRSLMYSAQKTMDLPFLEASTLRAGERPELCRVSLPEFQQFLLDYQGELWAVDRLQVQEFMLSFLRDPLREIEEPYFFLDEFVTFLFSKENSVWNSQLDAVCPDTMNNPLSHYWISSSHNTYLTGDQFSSESSLEAYARCLRMGCRCIELDCWDGPDGMPVIYHGHTLTTKIKFSDVLHTIKEHAFVASEYPVILSIEDHCSIAQQRNMAQYFKKVLGDTLLTKPVEISADGLPSPNQLKRKILIKHKKLAEGSAYEEVPTSMMYSENDISNSIKNGILYLEDPVNHEWYPHYFVLTSSKIYYSEETSSDQGNEDEEEPKEVSSSTELHSNEKWFHGKLGAGRDGRHIAERLLTEYCIETGAPDGSFLVRESETFVGDYTLSFWRNGKVQHCRIHSRQDAGTPKFFLTDNLVFDSLYDLITHYQQVPLRCNEFEMRLSEPVPQTNAHESKEWYHASLTRAQAEHMLMRVPRDGAFLVRKRNEPNSYAISFRAEGKIKHCRVQQEGQTVMLGNSEFDSLVDLISYYEKHPLYRKMKLRYPINEEALEKIGTAEPDYGALYEGRNPGFYVEANPMPTFKCAVKALFDYKAQREDELTFIKSAIIQNVEKQEGGWWRGDYGGKKQLWFPSNYVEEMVNPVALEPEREHLDENSPLGDLLRGVLDVPACQIAIRPEGKNNRLFVFSISMASVAHWSLDVAADSQEELQDWVKKIREVAQTADARLTEGKIMERRKKIALELSELVVYCRPVPFDEEKIGTERACYRDMSSFPETKAEKYVNKAKGKKFLQYNRLQLSRIYPKGQRLDSSNYDPLPMWICGSQLVALNFQTPDKPMQMNQALFMTGRHCGYVLQPSTMRDEAFDPFDKSSLRGLEPCAISIEVLGARHLPKNGRGIVCPFVEIEVAGAEYDSTKQKTEFVVDNGLNPVWPAKPFHFQISNPEFAFLRFVVYEEDMFSDQNFLAQATFPVKGLKTGYRAVPLKNNYSEDLELASLLIKIDIFPAKQENGDLSPFSGTSLRERGSDASGQLFHGRAREGSFESRYQQPFEDFRISQEHLADHFDSRERRAPRRTRVNGDNRL

SEQ ID NO: 3908 - protein, 1290 aa, Homo sapiens
MAGAASPCANGCGPGAPSDAEVLHLCRSLEVGTVMTLFYSKKSQRPERKTFQVKLETRQITWSRGADKIEGAIDIREIKEIRPGKTSRDFDRYQEDPAFRPDQSHCFVILYGMEFRLKTLSLQATSEDEVNMWIKGLTWLMEDTLQAPTPLQIERWLRKQFYSVDRNREDRISAKDLKNMLSQVNYRVPNMRFLRERLTDLEQRSGDITYGQFAQLYRSLMYSAQKTMDLPFLEASTLRAGERPELCRVSLPEFQQFLLDYQGELWAVDRLQVQEFMLSFLRDPLREIEEPYFFLDEFVTFLFSKENSVWNSQLDAVCPDTMNNPLSHYWISSSHNTYLTGDQFSSESSLEAYARCLRMGCRCIELDCWDGPDGMPVIYHGHTLTTKIKFSDVLHTIKEHAFVASEYPVILSIEDHCSIAQQRNMAQYFKKVLGDTLLTKPVEISADGLPSPNQLKRKILIKHKKLAEGSAYEEVPTSMMYSENDISNSIKNGILYLEDPVNHEWYPHYFVLTSSKIYYSEETSSDQGNEDEEEPKEVSSSTELHSNEKWFHGKLGAGRDGRHIAERLLTEYCIETGAPDGSFLVRESETFVGDYTLSFWRNGKVQHCRIHSRQDAGTPKFFLTDNLVFDSLYDLITHYQQVPLRCNEFEMRLSEPVPQTNAHESKEWYHASLTRAQAEHMLMRVPRDGAFLVRKRNEPNSYAISFRAEGKIKHCRVQQEGQTVMLGNSEFDSLVDLISYYEKHPLYRKMKLRYPINEEALEKIGTAEPDYGALYEGRNPGFYVEANPMPTFKCAVKALFDYKAQREDELTFIKSAIIQNVEKQEGGWWRGDYGGKKQLWFPSNYVEEMVNPVALEPEREHLDENSPLGDLLRGVLDVPACQIAIRPEGKNNRLFVFSISMASVAHWSLDVAADSQEELQDWVKKIREVAQTADARLTEGKIMERRKKIALELSELVVYCRPVPFDEEKIGTERACYRDMSSFPETKAEKYVNKAKGKKFLQYNRLQLSRIYPKGQRLDSSNYDPLPMWICGSQLVALNFQTPDKPMQMNQALFMTGRHCGYVLQPSTMRDEAFDPFDKSSLRGLEPCAISIEVLGARHLPKNGRGIVCPFVEIEVAGAEYDSTKQKTEFVVDNGLNPVWPAKPFHFQISNPEFAFLRFVVYEEDMFSDQNFLAQATFPVKGLKTGYRAVPLKNNYSEDLELASLLIKIDIFPAKENGDLSPFSGTSLRERGSDASGQLFHGRAREGSFESRYQQPFEDFRISQEHLADHFDSRERRAPRRTRVNGDNRL

SEQ ID NO: 3909 - protein, 194 aa, Homo sapiens
MALRELKVCLLGDTGVGKSSIVWRFVEDSFDPNINPTIGASFMTKTVQYQNELHKFLIWDTAGQERFRALAPMYYRGSAAAIIVYDITKEETFSTLKNWVKELRQHGPPNIVVAIAGNKCDLIDVREVMERDAKDYADSIHAIFVETSAKNAININELFIEISRRIPSTDANLPSGGKGFKLRRQPSEPKRSCC

SEQ ID NO: 3910 - protein, 1086 aa, Homo sapiens
MANLLKTVVTGCSCPLLSNLGSCKGLRVKKDFLRTFYTHQELWCKAPVKPGIPYKQLTVGVPKEIFQNEKRVALSPAGVQNLVKQGFNVVVESGAGEASKFSDDHYRVAGAQIQGAKEVLASDLVVKVRAPMVNPTLGVHEADLLKTSGTLISFIYPAQNPELLNKLSQRKTTVLAMDQVPRVTIAQGYDALSSMANIAGYKAVVLAANHFERFFTGQITAAGKVPPAKILIVGGGVAGLASAGAAKSMGAIVRGFDTRAAALEQFKSLGAEPLEVDLKESGEGQGGYAKEMSKEFIEAEMKLFAQQCKEVDILISTALIPGKKAPVLFNKEMIESMKEGSVVVDLAAEAGGNFETTKPGELYIHKGITHIGYTDLPSRMATQASTLYSNNITKLLKAISPDKDNFYFDVKDDFDFGTMGHVIRGTVVMKDGKVIFPAPTPKNIPQGAPVKQKTVAELEAEKAATITPFRKTMSTASAYTAGLTGILGLGIAAPNLAFSQMVTTFGLAGIVGYHTVWGVTPALHSPLMSVTNAISGLTAVGGLALMGGHLYPSTTSQGLAALAAFISSVNIAGGFLVTQRMLDMFKRPTDPPEYNYLYLLPAGTFVGGYLAALYSGYNIEQIMYLGSGLCCVGALAGLSTQGTARLGNALGMIGVAGGLAATLGVLKPGPELLAQMSGAMALGGTIGLTIAKRIQISDLPQLVAAFHSLVGLAAVLTCIAEYIIEYPHFATDAAANLTKIVAYLGTYIGGVTFSGSLIAYGKLQGLLKSAPLLLPGRHLLNAGLLAASVGGIIPFMVDPSFTTGITCLGSVSALSAVMGVTLTAAIGGADMPVVITVLNSYSGWALCAEGFLLNNNLLTIVGALIGSSGAILSYIMCVAMNRSLANVILGGYGTTSTAGGKPMEISGTHTEINLDNAIDMIREANSIIITPGYGLCAAKAQYPIADLVKMLTEQGKKVRFGIHPVAGRMPGQLNVLLAEAGVPYDIVLEMDEINHDFPDTDLVLVIGANDTVNSAAQEDPNSIIAGMPVLEVWKSKQVIVMKRSLGVGYAAVDNPIFYRPNTAMLLGDAKKTCDALQAKVRESYQK

SEQ ID NO: 3911 - protein, 1086 aa, Homo sapiens
MANLLKTVVTGCSCPLLSNLGSCKGLRVKKDFLRTFYTHQELWCKAPVKPGIPYKQLTVGVPKEIFQNEKRVALSPAGVQNLVKQGFNVVVESGAGEASKFSDDHYRVAGAQIQGAKEVLASDLVVKVRAPMVNPTLGVHEADLLKTSGTLISFIYPAQNPELLNKLSQRKTTVLAMDQVPRVTIAQGYDALSSMANIAGYKAVVLAANHFGRFFTGQITAAGKVPPAKILIVGGGVAGLASAGAEKSMGAIVRGFDTRAASLEQFKSLGAEPLEVDLKESGEGQGGYAKEMSKEFIEAEMKLFAQQCKEVDILISTALIPGKKAPVLFNKEMIESMKEGSVVVDLAAEAGGNFETTKPGELYIHKGITHIGYTDLPSRMATQASTLYSNNITKLLKAISPDKDNFYFDVKDDFDFGTMGHVIRGTVVMKDGKVIFPAPTPKNIPQGAPVKQKTVAELEAEKAATITPFRKTMSTASAYTAGLTGILGLGIAAPNLAFSQMVTTFGLAGIVGYHTVWGVTPALHSPLMSVTNAISGLTAVGGLALMGGHLYPSTTSQGLAALAAFISSVNIAGGFLVTQRMLDMFKRPTDPPEYNYLYLLPAGTFVGGYLAALYSGYNIEQIMYLGSGLCCVGALAGLSTQGTARLGNALGMIGVAGGLAATLGVLKPGPELLAQMSGAMALGGTIGLTIAKRIQISDLPQLVAASHSLVGLAAVLTCIAEYIIEYPHFAPDAAANLTKIVAYLGTYIGGVTFSGSLIAYGKLQGLLKSAPLLLPGRHLLNAGLLAASVGGIIPFMVDPSFTTGITCLGSVSALSAVMGVTLTAAIGGADMPVVITVLNSYSGWALCAEGFLLNNNLLTIVGALIGSSGAPLSYIMCVAMNRSLANVILGGYGTTSTAGGKPMEISGTHTEINLDNAIDMIREANSIIFTPGYGLCAAKAQYPIADLVKMLTEQGKKVRFGIHPVAGRMPGQLNVLLAEAGVPYDIVLEMDEINHDFPDTDLVLVIGANDTVNSAAQEDPNSIIAGMPVLEVWKSKQVIVMKRSLGVGYAAVDNPIFYKPNTAMLLGDAKKTCDALQAKVRESYQK

SEQ ID NO: 3912 - protein, 309 aa, Homo sapiens
MAFVKSGWLLRQSTILKRWKKNWFDLWSDGHLIYYDDQTRQNIEDKVHMPMDCINIRTGQECRDTQPPDGKSKDCMLQIVCRDGKTISLCAESTDDCLAWKFTLQDSRTNTAYVGSAVMTDETSVVSSPPPYTAYAAPAPEELHSKGPKIHTTTSAKTQAVLPTRCFFPSESPIRRSVQISVLLPAVNIRRRIKLTFPQPARPRAPRSLCLWQTWFAGKRAPSLPTAATAPALPSCPSPPAPSKALPPSLAGWRSPSSAPLPPEQALAPRSFQLSKHQARPRPHRPGTPPVPAWPGVPPPPPARPPALR

SEQ ID NO: 3913 - protein, 221 aa, Homo sapiens
MAFVKSGWLLRQSTILKRWKKNWFDLWSDGHLIYYDDQTRQNIEDKVHMPMDCINIRTGQECRDTQPPDGKSKDCMLQIVCRDGKTISLCAESTDDCLAWKFTLQDSRTNTAYVGSAVMTDETSVVSSPPPYTAYAAPAPEAYGYGPYGGAYPPGTQVVYAANGQAYAVPHQYPYAGLYGQQPANQVIIRERYRDNDSDLALGMLAGAATGMALGSLFWVF

SEQ ID NO: 3914 - protein, 290 aa, Homo sapiens
MVELEQEVERRQRLGQESAARKALIASSYHPARPEVYDSLQDAALAPEFLAVTEYSVSPDADLKGLLQRLETVSEEKRIYRVPVFTAPFCQALLEELEHFEQSDMPKGRPNTMNNYGVLLHELGLDEPLMTPLRERFLQPLMALLYPDCGGGRLDSHRAFVVKYAPGQDLELGCHYDNAELTLNVALGKVFTGGALYFGGLFQAPTALTEPLEVEHVVGQGVLHRGGQLHGARPLGTGERWNLVVWLRASAVRNSLCPMCCREPDLVDDEGFGDGFTREEPATVDVCALT

SEQ ID NO: 3915 - protein, 183 aa, Homo sapiens
MREYKVVVLGSGGVGKSALTVQFVTGSFIEKYDPTIEDFYRKEIEVDSSPSVLEILDTAGTEQFASMRDLYIKNGQGFILVYSLVNQQSFQDIKPMRDQIIRVKRYERVPMILVGNKVDLEGEREVSYGEGKALAEEWSCPFMETSAKNKASVDELFAEIVRQMNYAAQPNGDEGCCSACVIL

SEQ ID NO: 3916 - protein, 302 aa, Homo sapiens
MSEDEEKVKLRRLEPAIQKFIKIVIPTNLERLRKHQINIEKYQRCRIWDKLHEEHINAGRTVQQLRSNIREIEKLCLKVRKDDLVLLKRMIDPVKEEASAATAEFLQLHLESVEELKKQFNDEETLLQPPLTRSMTVGGAFHTTEAEASSQSLTQIYALPEIPQDQNAAESRETLEADLIELSQLVTDFSLLVNSQQEKIDSIADHVNSAAVNVEEGTKNLGKAAKYKLAALPVAGALIGGMVGGPIGLLACFKVAGIAAALGGGVLGFTGGKLIQRKKQKMMEKLTSSCPDLPSQTDKKCS

SEQ ID NO: 3917 - protein, 1401 aa, Homo sapiens
MASCASIDIEDATQHLRDILKLDRPAGGPSAESPRPSSAYNGDLNGLLVPDPLCSGDSTSANKTGLRTMPPINLQEKQVICLSGDDSSTCIGILAKEVEIVASSDSSISSKARGSNKVKIQPVAKYDWEQKYYYGNLIAVSNSFLAYAIRAANNGSAMVRVISVSTSERTLLKGFTGSVADLAFAHLNSPQLACLDEAGNLFVWRLALVNGKIQEEILVHIRQPEGTPLNHFRRIIWCPFIPEESEDCCEESSPTVALLHEDRAEVWDLDMLRSSHSTWPVDVSQIKQGFIVVKGHSTCLSEGALSPDGTVLATASHDGYVKFWQIYIEGQDEPRCLHEWKPHDGRPLSCLLFCDNHKKQDPDVPFWRFLITGADQNRELKMWCTVSWTCLQTIRFSPDIFSSVSVPPSLKVCLDLSAEYLILSDVQRKVLYVMELLQNQEEGHACFSSISEFLLTHPVLSFGIQVVSRCRLRHTEVLPAEEENDSLGADGTHGAGAMESAAGVLIKLFCVHTKALQDVQIRFQPQLNPDVVAPLPTHTAHEDFTFGESRPELGSEGLGSAAHGSQPDLRRIVELPAPADFLSLSSETKPKLMTPDAFMTPSASLQQITASPSSSSSGSSSSSSSSSSSLTAVSAMSSTSAVDPSLTRPPEELTLSPKLQLDGSLTMSSSGSLQASPRGLLPGLLPAPADKLTPKGPGQVPTATSALSLELQEVEPLGLPQASPSRTRSPDVISSASTALSQDIPEIASEALSRGFGSSAPEGLEPDSMASAASALHLLSPRPRPGPELGPQLGLDGGPGDGDRHNTPSLLEAALTQEASTPDSQVWPTAPDITRETCSTLAESPRNGLQEKHKSLAFHRPPYHLLQQRDSQDASAEQSDHDDEVASLASASGGFGTKVPAPRLPAKDWKTKGSPRTSPKLKRKSKKDDGDAAMGSRLTEHQVAEPPEDWPALIWQQQRELAELRHSQEELLQRLCTQLEGLQSTVTGHVERALETRHEQEQRRLERALAEGQQRGGQLQEQLTQQLSQALSSAVAGRLERSIRDEIKKTVPPCVSRSLEPMAGQLSNSVATKLTAVEGSMKENISKLLKSKNLTDAIARAAADTLQGPMQAAYREAFQSVVLPAFEKSCQAMFQQINDSFRLGTQEYLQQLESHMKSRKAREQEAREPVLAQLRGLVSTLQSATEQMAATVAGSVRAEVQHQLHVAVGSLQESILAQVQRIVKGEVSVALKEQQAAVTSSIMQAMRSAAGTPVPSAHLDCQAQQAHILQLLQQGHLNQAFQQALTAADLNLVLYVCETVDPAQVFGQPPCPLSQPVLLSLIQQLASDLGTRTDLKLSYLEEAVMHLDHSDPITRDHMGSVMAQVRQKLFQFLQAEPHNSLGKAARRLSLMLHGLVTPSLP

SEQ ID NO: 3918 - protein, 421 aa, Homo sapiens
MADISLDELIRKRGAAAKGRLNARPGVGGVRSRVGIQQGLLSQSTRTATFQQRFDARQKIGLSDARLKLGVKDAREKLLQKDARFRIKGKVQDAREMLNSRKQQTTVPQKPRQVADAREKISLKRSSPAAFINPPIGTVTPALKLTKTIQVPQQKAMAPLHPHPAGMRINVVNNHQAKQNLYDLDEDDDGIASVPTKQMKFAASGGFLHHMAGLSSSKLSMSKALPLTKVVQNDAYTAPALPSSIRTKALTNMSRTLVNKEEPPKELPAAEPVLSPLEGTKMTVNNLHPRVTEEDIVELFCVCGALKRARLVHPGVAEVVFVKKDDAITAYKKYNNRCLDGQPMKCNLHMNGNVITSDQPILLRLSDSPSMKKESELPRRVNSASSSNPPAEVDPDTILKALFKSSGASVTTQPTEFKIKL

SEQ ID NO: 3919 - protein, 392 aa, Homo sapiens
MADISLDELIRKRGAAAKGRLNARPGVGGVRSRVGIQQGLLSQSTRTATFQQRFDARQKIGLSDARLKLGVKDAREKLLQKDARFRIKGKVQDAREMLNSRKQQTTVPQKPRQVADAREKISLKRSSPAAFINPPIGTVTPALKLTKTIQNLYDLDEDDDGIASVPTKQMKFAASGGFLHHMAGLSSSKLSMSKALPLTKVVQNDAYTAPALPSSIRTKALTNMSRTLVNKEEPPKELPAAEPVLSPLEGTKMTVNNLHPRVTEEDIVELFCVCGALKRARLVHPGVAEVVFVKKDDAITAYKKYNNRCLDGQPMKCNLHMNGNVITSDQPILLRLSDSPSMKKESELPRRVNSASSSNPPAEVDPDTILKALFKSSGASVTTQPTEFKIKL

SEQ ID NO: 3920 - protein, 126 aa, Homo sapiens
MWYLAKLIRGMSIDQALAQLEFNDKKGAKIIKEVLLEAQDMAVRDHNVEFRSNLYIAESTSGRGQCLKRIRYHGRGRFGIMEKVYCHYFVKLVEGPPPPPEPPKTAVAHAKEYIQQLRSRTIVHTL

SEQ ID NO: 3921 - protein, 206 aa, Homo sapiens
MAAAVLGQLGALWIHNLRSRGKLALGVLPQSYIHTSASLDISRKWEKKNKIVYPPQLPGEPRRPAEIYHCRRQIKYSKDKMWYLAKLIRGMSIDQALAQLEFNDKKGAKIIKEVLLEAQDMAVRDHNVEFRSNLYIAESTSGRGQCLKRIRYHGRGRFGIMEKVYCHYFVKLVEGPPPPPEPPKTAVAHAKEYIQQLRSRTIVHTL

SEQ ID NO: 3922 - protein, 1029 aa, Homo sapiens
MQTNEGEVSEESSSKVEQEDFVMEGHGKTPPPGEESKQEKEQEREEQLMEDKKRKKEDKKKKEATQKVTEQKTKVPEVTKPSLSQPTAASPIGSSPSPPVNGGNNAKRVAVPNGQPPSAARYMPREVPPRFRCQQDHKVLLKRGQPPPPSCMLLGGGAGPPPCTAPGANPNNAQVTGALLQSESGTAPVWSKSTPPAPDNGTSAWGEPNESSPGWGEMDDTGASTTGWGNTPANAPNAMKPNSKSMQDGWGESDGPVTGARHPSWEEEEDGGVWNTTGSQGSASSHNSASWGQGGKKQMKCSLKGGNNDSWMNPLAKQFSNMGLLSQTEDNPSSKMDLSVGSLSDKKFDVDKRAMNLGDFNDIMRKDRSGFRPPNSKDMGTTDSGPYFEKGGSHGLFGNSTAQSRGLHTPVQPLNSSPSLRAQVPPQFISPQVSASMLKQFPNSGLSPGLFNVGPQLSPQQIAMLSQLPQIPQFQLACQLLLQQQQQQQLLQNQRKISQAVRQQQEQQLARMVSALQQQQQQQQRQPGMKHSPSHPVGPKPHLDNMVPNALNVGLPDLQTKGPIPGYGSGFSSGGMDYGMVGGKEAGTESRFKQWTSMMEGLPSVATQEANMHKNGAIVAPGKTRGGSPYNQFDIIPGDTLGGHTGPAGDSWLPAKSPPTNKIGSKSSNASWPPEFQPGVPWKGIQNIDPESDPYVTPGSVLGGTATSPIVDTDHQLLRDNTTGSNSSLNTSLPSPGAWPYSASDNSFTNVHSTSAKFPDYKSTWSPDPIGHNPTHLSNKMWKNHISSRNTTPLPRPPPGLTNPKPSSPWSSTAPRSVRGWGTQDSRLASASTWSDGGSVRPSYWLVLHNLTPQIDGSTLRTICMQHGPLLTFHLNLTQGTALIRYSTKQEAAKAQTALHMCVLGNTTILAEFATDDEVSRFLAQAQPPTPAATPSAPAAGWQSLETGQNQSDPVGPALNLFGGSTGLGQWSSSAGGSSGADLAGASLWGPPNYSSSLWGVPTVEDPHRMGSPAPLLPGDLLGGGSDSI

SEQ ID NO: 3923 - protein, 1722 aa, Homo sapiens
MREKEQEREEQLMEDKKRKKEDKKKKEATQKVTEQKTKVPEVTKPSLSQPTAASPIGSSPSPPVNGGNNAKRVAVPNGQPPSAARYMPREVPPRFRCQQDHKVLLKRGQPPPPSCMLLGGGAGPPPCTAPGANPNNAQVTGALLQSESGTAPDSTLGGAAASNYANSTWGSGASSNNGTSPNPIHIWDKVIVDGSDMEEWPCIASKDTESSSENTTDNNSASNPGSEKSTLPGSTTSNKGKGSQCQSASSGNECNLGVWKSDPKAKSVQSSNSTTENNNGLGNWRNVSGQDRIGPGSGFSNFNPNSNPSAWPALVQEGTSRKGALETDNSNSSAQVSTVGQTSREQQSKMENAGVNFVVSGREQAQIHNTDGPKNGNTNSLNLSSPNPMENKGMPFGMGLGNTSRSTDAPSQSTGDRKTGSVGSWGAARGPSGTDTVSGQSNSGNNGNNGKEREDSWKGASVQKSTGSKNDSWDNNNRSTGGSWNFGPQDSNDNKWGEGNKMTSGVSQGEWKQPTGSDELKIGEWSGPNQPNSSTGAWDNQKGHPLPENQGNAQAPCWGRSSSSTGSEVGGQSTGSNHKAGSSDSHNSGRRSYRPTHPDCQAVLQTLLSRTDLDPRVLSNTGWGQTQIKQDTVWDIEEVPRPEGKSDKGTEGWESAATQTKNSGGWGDAPSQSNQMKSGWGELSASTEWKDPKNTGGWNDYKNNNSSNWGGGRPDEKTPSSWNENPSKDQGWGGGRQPNQGWSSGKNGWGEEVDQTKNSNWESSASKPVSGWGEGGQNEIGTWGNGGNASLASKGGWEDCKRSPAWNETGRQPNSWNKQHQQQQPPQQPPPPQPEASGSWGGPPPPPPGNVRPSNSSWSSGPQPATPKDEEPSGWEEPSPQSISRKMDIDDGTSAWGDPNSYNYKNVNLWDKNSQGGPAPREPNLPTPMTSKSASDSKSMQDGWGESDGPVTGARHPSWEEEEDGGVWNTTGSQGSASSHNSASWGQGGKKQMKCSLKGGNNDSWMNPLAKQFSNMGLLSQTEDNPSSKMDLSVGSLSDKKFDVDKRAMNLGDFNDIMRKDRSGFRPPNSKDMGTTDSGPYFEKGGSHGLFGNSTAQSRGLHTPVQPLNSSPSLRAQVPPQFISPQVSASMLKQFPNSGLSPGLFNVGPQLSPQQIAMLSQLPQIPQFQLACQLLLQQQQQQQLLQNQRKISQAVRQQQEQQLARMVSALQQQQQQQRQPGMKHSPSHPVGPKPHLDNMVPNALNVGLPDLQTKGPIPGYGSGFSSGGMDYGMVGGKEAGTESRFKQWTSMMEGLPSVATQEANMHKNGAIVAPGKTRGGSPYNQFDIIPGDTLGGHTGPAGDSWLPAKSPPTNKIGSKSSNASWPPEFQPGVPWKGIQNIDPESDPYVTPGSVLGGTATSPIVDTDHQLLRDNTTGSNSSLNTSLPSPGAWPYSASDNSFTNVHSTSAKFPDYKSTWSPDPIGHNPTHLSNKMWKNHISSRNTTPLPRPPPGLTNPKPSSPWSSTAPRSVRGWGTQDSRLASASTWSDGGSVRPSYWLVLHNLTPQIDGSTLRTICMQHGPLLTFHLNLTQGTALIRYSTKQEAAKAQTALHMCVLGNTTILAEFATDDEVSRFLAQAQPPTPAATPSAPAAGWQSLETGQNQSDPVGPALNLFGGSTGLGQWSSSAGGSSGADLAGASLWGPPNYSSSLWGVPTVEDPHRMGSPAPLLPGDLLGGGSDSI

SEQ ID NO: 3924 - protein, 525 aa, Homo sapiens
MAAGGSGGRASCPPGVGVGPGTGGSPGPSANAAATPAPGNAAAAAAAAAAAAAAPGPTPPAPPGPGTDAQAAGAERAEEAAGPGAAALQREAAYNWQASKPTVQERFAFLFNNEVLCDVHFLVGKGLSSQRIPAHRFVLAVGSAVFDAMFNGGMATTSTEIELPDVEPAAFLALLKFLYSDEVQIGPETVMTTLYTAKKYAVPALEAHCVEFLKKNLRADNAFMLLTQARLFDEPQLASLCLENIDKNTADAITAEGFTDIDLDTLVAVLERDTLGIREVRLFNAVVRWSEAECQRQQLQVTPENRRKVLGKALGLIRFPLMTIEEFAAGPAQSGILVDREVVSLFLHFTVNPKPRVEFIDRPRCCLRGKECSINRFQQVESRWGYSGTSDRIRFSVNKRIFVVGFGLYGSIHGPTDYQVNIQIIHTDSNTVLGQNDTGFSCDGSASTFRVMFKEPVEVLPNVNYTACATLKGPDSHYGTKGLRKVTHESPTTGAKTCFTFCYAAGNNNGTSVEDGQIPEVIFYT

SEQ ID NO: 3925 - protein, 284 aa, Homo sapiens
MGSEKEQSPEPHLPEEGEGGKPWRVDDSEGSWIPPGEKEHGQESLSDELQETHPKKPWQKVTVRARELGDPIAHPRHEADEKPFICAQCGKTFNNTSNLRTHQRIHTGEKPYKCSECGKSFSRSSNRIRHERIHLEEKHYKCPKCQESFRRRSDLTTHQQDHLGKRPYRCDICGKSFSQSATLAVHHRTHLEPAPYICCECGKSFSNSSSFGVHHRTHTGERPYECTECGRTFSDISNFGAHQRTHRGEKPYRCTVCGKHFSRSSNLIRHQKTHLGEQAGKDSS

SEQ ID NO: 3926 - protein, 847 aa, Homo sapiens
MSLWGLVSKMPPEKVQRLYVDFPQHLRHLLGDWLESQPWEFLVGSDAFCCNLASALLSDTVQHLQASVGEQGEGSTILQHISTLESIYQRDPLKLVATFRQILQGEKKAVMEQFRHLPMPFHWKQEELKFKTGLRRLQHRVGEIHLLREALQKGAEAGQVSLHSLIETPANGTGPSEALAMLLQETTGELEAAKALVLKRIQIWKRQQQLAGNGAPFEESLAPLQERCESLVDIYSQLQQEVGAAGGELEPKTRASLTGRLDEVLRTLVTSCFLVEKQPPQVLKTQTKFQAGVRFLLGLRFLGAPAKPPLVRADMVTEKQARELSVPQGPGAGAESTGEIINNTVPLENSIPGNCCSALFKNLLLKKIKRCERKGTESVTEEKCAVLFSASFTLGPGKLPIQLQALSLPLVVIVHGNQDNNAKATILWDNAFSEMDRVPFVVAERVPWEKMCETLNLKFMAEVGTNRGLLPEHFLFLAQKIFNDNSLSMEAFQHRSVSWSQFNKEILLGRGFTFWQWFDGVLDLTKRCLRSYWSDRLIIGFISKQYVTSLLLNEPDGTFLLRFSDSEIGGITIAHVIRGQDGSPQIENIQPFSAKDLSIRSLGDRIRDLAQLKNLYPKKPKDEAFRSHYKPEQMGKDGRGYVPATIKMTVERDQPLPTPELQMPTMVPSYDLGMAPDSSMSMQLGPDMVPQVYPPHSHSIPPYQGLSPEESVNVLSAFQEPHLQMPPSLGQMSLPFDQPHPQGLLPCQPQEHAVSSPDPLLCSDVTMVEDSCLSQPVTAFPQGTWIGEDIFPPLLPPTEQDLTKLLLEGQGESGGGSLGAQPLLQPSHYGQSGISMSHMDLRANPSW

SEQ ID NO: 3927 - protein, 472 aa, Homo sapiens
MGCDRNCGLIAGAVIGAVLAVFGGILMPVGDLLIQKTIKKQVVLEEGTIAFKNWVKTGTEVYRQFWIFDVQNPQEVMMNSSNIQVKQRGPYTYRVRFLAKENVTQDAEDNTVSFLQPNGAIFEPSLSVGTEADNFTVLNLAVAAASHIYQNQFVQMILNSLINKSKSSMFQVRTLRELLWGYRDPFLSLVPYPVTTTVGLFYPYNNTADGVYKVFNGKDNISKVAIIDTYKGKRNLSYWESHCDMINGTDAASFPPFVEKSQVLQFFSSDICRSIYAVFESDVNLKGIPVYRFVLPSKAFASPVENPDNYCFCTEKIISKNCTSYGVLDISKCKEGRPVYISLPHFLYASPDVSEPIDGLNPNEEEHRTYLDIEPITGFTLQFAKRLQVNLLVKPSEKIQVLKNLKRNYIVPILWLNETGTIGDEKANMFRSQVTGKINLLGLIEMILLSVGVVMFVAFMISYCACRSKTIK

SEQ ID NO: 3928 - protein, 472 aa, Homo sapiens; identical to SEQ ID NO: 3927

SEQ ID NO: 3929 - protein, 472 aa, Homo sapiens; identical to SEQ ID NO: 3927

SEQ ID NO: 3930 - protein, 339 aa, Homo sapiens
MAAEDELQLPRLPELFETGRQLLDEVEVATEPAGSRIVQEKVFKGLDLLEKAAEMLSQLDLFSRNEDLEEIASTDLKYLLVPAFQGALTMKQVNPSKRLDHLQRAREHFINYLTQCHCYHVAEFELPKTMNNSAENHTANSSMAYPSLVAMASQRQAKIQRYKQKKELEHRLSAMKSAVESGQADDERVREYYLLHLQRWIDISLEEIESIDQEIKILRERDSSREASTSNSSRQERPPVKPFILTRNMAQAKVFGAGYPSLPTMTVSDWYEQHRKYGALPDQGIAKAAPEEFRKAAQQQEEQEEKEEEDDEQTLHRAREWDDWKDTHPRGYGNRQNMG

SEQ ID NO: 3931 - protein, 1531 aa, Homo sapiens
MALRGFCSADGSDPLWDWNVTWNTSNPDFTKCFQNTVLVWVPCFYLWACFPFYFLYLSRHDRGYIQMTPLNKTKTALGFLLWIVCWADLFYSFWERSRGIFLAPVFLVSPTLLGITTLLATFLIQLERRKGVQSSGIMLTFWLVALVCALAILRSKIMTALKEDAQVDLFRDITFYVYFSLLLIQLVLSCFSDRSPLFSETIHDPNPCPESSASFLSRITFWWITGLIVRGYRQPLEGSDLWSLNKEDTSEQVVPVLVKNWKKECAKTRKQPVKVVYSSKDPAQPKESSKVDANEEVEALIVKSPQKEWNPSLFKVLYKTFGPYFLMSFFFKAIHDLMMFSGPQILKLLIKFVNDTKAPDWQGYFYTVLLFVTACLQTLVLHQYFHICFVSGMRIKTAVIGAVYRKALVITNSARKSSTVGEIVNLMSVDAQRFMDLATYINMIWSAPLQVILALYLLWLNLGPSVLAGVAVMVLMVPVNAVMAMKTKTYQVAHMKSKDNRIKLMNEILNGIKVLKLYAWELAFKDKVLAIRQEELKVLKKSAYLSAVGTFTWVCTPFLVALCTFAVYVTIDENNILDAQTAFVSLALFNILRFPLNILPMVISSIVQASVSLKRLRIFLSHEELEPDSIERRPVKDGGGTNSITVRNATFTWARSDPPTLNGITFSIPEGALVAVVGQVGCGKSSLLSALLAEMDKVEGHVAIKGSVAYVPQQAWIQNDSLRENILFGCQLEEPYYRSVIQACALLPDLEILPSGDRTEIGEKGVNLSGGQKQRVSLARAVYSNADIYLFDDPLSAVDAHVGKHIFENVIGPKGMLKNKTRILVTHSMSYLPQVDVIIVMSGGKISEMGSYQELLARDGAFAEFLRTYASTEQEQDAEENGVTGVSGPGKEAKQMENGMLVTDSAGKQLQRQLSSSSSYSGDISRHHNSTAELQKAEAKKEETWKLMEADKAQTGQVKLSVYWDYMKAIGLFISFLSIFLFMCNHVSALASNYWLSLWTDDPIVNGTQEHTKVRLSVYGALGISQGIAVFGYSMAVSIGGILASRCLHVDLLHSILRSPMSFFERTPSGNLVNRFSKELDTVDSMIPEVIKMFMGSLFNVIGACIVILLATPIAAIIIPPLGLIYFFVQRFYVASSRQLKRLESVSRSPVYSHFNETLLGVSVIRAFEEQERFIHQSDLKVDENQKAYYPSIVANRWLAVRLECVGNCIVLFAALFAVISRHSLSAGLVGLSVSYSLQVTTYLNWLVRMSSEMETNIVAVERLKEYSETEKEAPWQIQETAPPSSWPQVGRVEFRNYCLRYREDLDFVLRHINVTINGGEKVGIVGRTGAGKSSLTLGLFRINESAEGEIIIDGINIAKIGLHDLRFKITIIPQDPVLFSGSLRMNLDPFSQYSDEEVWTSLELAHLKDFVSALPDKLDHECAEGGENLSVGQRQLVCLARALLRKTKILVLDEATAAVDLETDDLIQSTIRTQFEDCTVLTIAHRLNTIMDYTRVIVLDKGEIQEYGAPSDLLQQRGLFYSMAKDAGLV

SEQ ID NO: 3932 - protein, 1472 aa, Homo sapiens
MALRGFCSADGSDPLWDWNVTWNTSNPDFTKCFQNTVLVWVPCFYLWACFPFYFLYLSRHDRGYIQMTPLNKTKTALGFLLWIVCWADLFYSFWERSRGIFLAPVFLVSPTLLGITTLLATFLIQLERRKGVQSSGIMLTFWLVALVCALAILRSKIMTALKEDAQVDLFRDITFYVYFSLLLIQLVLSCFSDRSPLFSETIHDPNPCPESSASFLSRITFWWITGLIVRGYRQPLEGSDLWSLNKEDTSEQVVPVLVKNWKKECAKTRKQPVKVVYSSKDPAQPKESSKVDANEEVEALIVKSPQKEWNPSLFKVLYKTFGPYFLMSFFFKAIHDLMMFSGPQILKLLIKFVNDTKAPDWQGYFYTVLLFVTACLQTLVLHQYFHICFVSGMRIKTAVIGAVYRKALVITNSARKSSTVGEIVNLMSVDAQRFMDLATYINMIWSAPLQVILALYLLWLNLGPSVLAGVAVMVLMVPVNAVMAMKTKTYQVAHMKSKDNRIKLMNEILNGIKVLKLYAWELAFKDKVLAIRQEELKVLKKSAYLSAVGTFTWVCTPFLVALCTFAVYVTIDENNILDAQTAFVSLALFNILRFPLNILPMVISSIVQASVSLKRLRIFLSHEELEPDSIERRPVKDGGGTNSITVRNATFTWARSDPPTLNGITFSIPEGALVAVVGQVGCGKSSLLSALLAEMDKVEGHVAIKGVNLSGGQKQRVSLARAVYSNADIYLFDDPLSAVDAHVGKHIFENVIGPKGMLKNKTRILVTHSMSYLPQVDVIIVMSGGKISEMGSYQELLARDGAFAEFLRTYASTEQEQDAEENGVTGVSGPGKEAKQMENGMLVTDSAGKQLQRQLSSSSSYSGDISRHHNSTAELQKAEAKKEETWKLMEADKAQTGQVKLSVYWDYMKAIGLFISFLSIFLFMCNHVSALASNYWLSLWTDDPIVNGTQEHTKVRLSVYGALGISQGIAVFGYSMAVSIGGILASRCLHVDLLHSILRSPMSFFERTPSGNLVNRFSKELDTVDSMIPEVIKMFMGSLFNVIGACIVILLATPIAAIIIPPLGLIYFFVQRFYVASSRQLKRLESVSRSPVYSHFNETLLGVSVIRAFEEQERFIHQSDLKVDENQKAYYPSIVANRWLAVRLECVGNCIVLFAALFAVISRHSLSAGLVGLSVSYSLQVTTYLNWLVRMSSEMETNIVAVERLKEYSETEKEAPWQIQETAPPSSWPQVGRVEFRNYCLRYREDLDFVLRHINVTINGGEKVGIVGRTGAGKSSLTLGLFRINESAEGEIIIDGINIAKIGLHDLRFKITIIPQDPVLFSGSLRMNLDPFSQYSDEEVWTSLELAHLKDFVSALPDKLDHECAEGGENLSVGQRQLVCLARALLRKTKILVLDEATAAVDLETDDLIQSTIRTQFEDCTVLTIAHRLNTIMDYTRVIVLDKGEIQEYGAPSDLLQQRGLFYSMAKDAGLV

SEQ ID NO: 3933 - protein, 1475 aa, Homo sapiens
MALRGFCSADGSDPLWDWNVTWNTSNPDFTKCFQNTVLVWVPCFYLWACFPFYFLYLSRHDRGYIQMTPLNKTKTALGFLLWIVCWADLFYSFWERSRGIFLAPVFLVSPTLLGITTLLATFLIQLERRKGVQSSGIMLTFWLVALVCALAILRSKIMTALKEDAQVDLFRDITFYVYFSLLLIQLVLSCFSDRSPLFSETIHDPNPCPESSASFLSRITFWWITGLIVRGYRQPLEGSDLWSLNKEDTSEQVVPVLVKNWKKECAKTRKQPVKVVYSSKDPAQPKESSKVDANEEVEALIVKSPQKEWNPSLFKVLYKTFGPYFLMSFFFKAIHDLMMFSGPQILKLLIKFVNDTKAPDWQGYFYTVLLFVTACLQTLVLHQYFHICFVSGMRIKTAVIGAVYRKALVITNSARKSSTVGEIVNLMSVDAQRFMDLATYINMIWSAPLQVILALYLLWLNLGPSVLAGVAVMVLMVPVNAVMAMKTKTYQVAHMKSKDNRIKLMNEILNGIKVLKLYAWELAFKDKVLAIRQEELKVLKKSAYLSAVGTFTWVCTPFLVALCTFAVYVTIDENNILDAQTAFVSLALFNILRFPLNILPMVISSIVQASVSLKRLRIFLSHEELEPDSIERRPVKDGGGTNSITVRNATFTWARSDPPTLNGITFSIPEGALVAVVGQVGCGKSSLLSALLAEMDKVEGHVAIKGSVAYVPQQAWIQNDSLRENILFGCQLEEPYYRSVIQACALLPDLEILPSGDRTEIGEKTRILVTHSMSYLPQVDVIIVMSGGKISEMGSYQELLARDGAFAEFLRTYASTEQEQDAEENGVTGVSGPGKEAKQMENGMLVTDSAGKQLQRQLSSSSSYSGDISRHHNSTAELQKAEAKKEETWKLMEADKAQTGQVKLSVYWDYMKAIGLFISFLSIFLFMCNHVSALASNYWLSLWTDDPIVNGTQEHTKVRLSVYGALGISQGIAVFGYSMAVSIGGILASRCLHVDLLHSILRSPMSFFERTPSGNLVNRFSKELDTVDSMIPEVIKMFMGSLFNVIGACIVILLATPIAAIIIPPLGLIYFFVQRFYVASSRQLKRLESVSRSPVYSHFNETLLGVSVIRAFEEQERFIHQSDLKVDENQKAYYPSIVANRWLAVRLECVGNCIVLFAALFAVISRHSLSAGLVGLSVSYSLQVTTYLNWLVRMSSEMETNIVAVERLKEYSETEKEAPWQIQETAPPSSWPQVGRVEFRNYCLRYREDLDFVLRHINVTINGGEKVGIVGRTGAGKSSLTLGLFRINESAEGEIIIDGINIAKIGLHDLRFKITIIPQDPVLFSGSLRMNLDPFSQYSDEEVWTSLELAHLKDFVSALPDKLDHECAEGGENLSVGQRQLVCLARALLRKTKILVLDEATAAVDLETDDLIQSTIRTQFEDCTVLTIAHRLNTIMDYTRVIVLDKGEIQEYGAPSDLLQQRGLFYSMAKDAGLV

SEQ ID NO: 3934 - protein, 1416 aa, Homo sapiens
MALRGFCSADGSDPLWDWNVTWNTSNPDFTKCFQNTVLVWVPCFYLWACFPFYFLYLSRHDRGYIQMTPLNKTKTALGFLLWIVCWADLFYSFWERSRGIFLAPVFLVSPTLLGITTLLATFLIQLERRKGVQSSGIMLTFWLVALVCALAILRSKIMTALKEDAQVDLFRDITFYVYFSLLLIQLVLSCFSDRSPLFSETIHDPNPCPESSASFLSRITFWWITGLIVRGYRQPLEGSDLWSLNKEDTSEQVVPVLVKNWKKECAKTRKQPVKVVYSSKDPAQPKESSKVDANEEVEALIVKSPQKEWNPSLFKVLYKTFGPYFLMSFFFKAIHDLMMFSGPQILKLLIKFVNDTKAPDWQGYFYTVLLFVTACLQTLVLHQYFHICFVSGMRIKTAVIGAVYRKALVITNSARKSSTVGEIVNLMSVDAQRFMDLATYINMIWSAPLQVILALYLLWLNLGPSVLAGVAVMVLMVPVNAVMAMKTKTYQVAHMKSKDNRIKLMNEILNGIKVLKLYAWELAFKDKVLAIRQEELKVLKKSAYLSAVGTFTWVCTPFLVALCTFAVYVTIDENNILDAQTAFVSLALFNILRFPLNILPMVISSIVQASVSLKRLRIFLSHEELEPDSIERRPVKDGGGTNSITVRNATFTWARSDPPTLNGITFSIPEGALVAVVGQVGCGKSSLLSALLAEMDKVEGHVAIKTRILVTHSMSYLPQVDVIIVMSGGKISEMGSYQELLARDGAFAEFLRTYASTEQEQDAEENGVTGVSGPGKEAKQMENGMLVTDSAGKQLQRQLSSSSSYSGDISRHHNSTAELQKAEAKKEETWKLMEADKAQTGQVKLSVYWDYMKAIGLFISFLSIFLFMCNHVSALASNYWLSLWTDDPIVNGTQEHTKVRLSVYGALGISQGIAVFGYSMAVSIGGILASRCLHVDLLHSILRSPMSFFERTPSGNLVNRFSKELDTVDSMIPEVIKMFMGSLFNVIGACIVILLATPIAAIIIPPLGLIYFFVQRFYVASSRQLKRLESVSRSPVYSHFNETLLGVSVIRAFEEQERFIHQSDLKVDENQKAYYPSIVANRWLAVRLECVGNCIVLFAALFAVISRHSLSAGLVGLSVSYSLQVTTYLNWLVRMSSEMETNIVAVERLKEYSETEKEAPWQIQETAPPSSWPQVGRVEFRNYCLRYREDLDFVLRHINVTINGGEKVGIVGRTGAGKSSLTLGLFRINESAEGEIIIDGINIAKIGLHDLRFKITIIPQDPVLFSGSLRMNLDPFSQYSDEEVWTSLELAHLKDFVSALPDKLDHECAEGGENLSVGQRQLVCLARALLRKTKILVLDEATAAVDLETDDLIQSTIRTQFEDCTVLTIAHRLNTIMDYTRVIVLDKGEIQEYGAPSDLLQQRGLFYSMAKDAGLV

SEQ ID NO: 3935 - protein, 1466 aa, Homo sapiens
MALRGFCSADGSDPLWDWNVTWNTSNPDFTKCFQNTVLVWVPCFYLWACFPFYFLYLSRHDRGYIQMTPLNKTKTALGFLLWIVCWADLFYSFWERSRGIFLAPVFLVSPTLLGITTLLATFLIQLERRKGVQSSGIMLTFWLVALVCALAILRSKIMTALKEDAQVDLFRDITFYVYFSLLLIQLVLSCFSDRSPLFSETIHDPNPCPESSASFLSRITFWWITGLIVRGYRQPLEGSDLWSLNKEDTSEQVVPVLVKNWKKECAKTRKQPVKVVYSSKDPAQPKESSKVDANEEVEALIVKSPQKEWNPSLFKVLYKTFGPYFLMSFFFKAIHDLMMFSGPQILKLLIKFVNDTKAPDWQGYFYTVLLFVTACLQTLVLHQYFHICFVSGMRIKTAVIGAVYRKALVITNSARKSSTVGEIVNLMSVDAQRFMDLATYINMIWSAPLQVILALYLLWLNLGPSVLAGVAVMVLMVPVNAVMAMKTKTYQVAHMKSKDNRIKLMNEILNGIKVLKLYAWELAFKDKVLAIRQEELKVLKKSAYLSAVGTFTWVCTPFLVALCTFAVYVTIDENNILDAQTAFVSLALFNILRFPLNILPMVISSIVQASVSLKRLRIFLSHEELEPDSIERRPVKDGGGTNSITVRNATFTWARSDPPTLNGITFSIPEGALVAVVGQVGCGKSSLLSALLAEMDKVEGHVAIKGSVAYVPQQAWIQNDSLRENILFGCQLEEPYYRSVIQACALLPDLEILPSGDRTEIGEKGVNLSGGQKQRVSLARAVYSNADIYLFDDPLSAVDAHVGKHIFENVIGPKGMLKNKTRILVTHSMSYLPQVDVIIVMSGGKISEMGSYQELLARDGAFAEFLRTYASTEQEQDAEENGVTGVSGPGKEAKQMENGMLVTDSAGKQLQRQLSSSSSYSGDISRHHNSTAELQKAEAKKEETWKLMEADKAQTGQVKLSVYWDYMKAIGLFISFLSIFLFMCNHVSALASNYWLSLWTDDPIVNGTQEHTKVRLSVYGALGISQGIAVFGYSMAVSIGGILASRCLHVDLLHSILRSPMSFFERTPSGNLVNRFSKELDTVDSMIPEVIKMFMGSLFNVIGACIVILLATPIAAIIIPPLGLIYFFVQRFYVASSRQLKRLESVSRSPVYSHFNETLLGVSVIRAFEEQERFIHQSDLKVDENQKAYYPSIVANRWLAVRLECVGNCIVLFAALFAVISRHSLSAGLVGLSVSYSLQVTTYLNWLVRMSSEMETNIVAVERLKEYSETEKEAPWQIQETAPPSSWPQVGRVEFRNYCLRYREDLDFVLRHINVTINGGEKVGIVGRTGAGKSSLTLGLFRINESAEGEIIIDGINIAKIGLHDLRFKITIIPQDPVLFSGSLRMNLDPFSQYSDEEVWTSLELAHLKDFVSALPDKLDHECAEGGENLRVIVLDKGEIQEYGAPSDLLQQRGLFYSMAKDAGLV

SEQ ID NO: 3936 - protein, 1489 aa, Homo sapiens
MALRGFCSADGSDPLWDWNVTWNTSNPDFTKCFQNTVLVWVPCFYLWACFPFYFLYLSRHDRGYIQMTPLNKTKTALGFLLWIVCWADLFYSFWERSRGIFLAPVFLVSPTLLGITTLLATFLIQLERRKGVQSSGIMLTFWLVALVCALAILRSKIMTALKENPCPESSASFLSRITFWWITGLIVRGYRQPLEGSDLWSLNKEDTSEQVVPVLVKNWKKECAKTRKQPVKVVYSSKDPAQPKESSKVDANEEVEALIVKSPQKEWNPSLFKVLYKTFGPYFLMSFFFKAIHDLMMFSGPQILKLLIKFVNDTKAPDWQGYFYTVLLFVTACLQTLVLHQYFHICFVSGMRIKTAVIGAVYRKALVITNSARKSSTVGEIVNLMSVDAQRFMDLATYINMIWSAPLQVILALYLLWLNLGPSVLAGVAVMVLMVPVNAVMAMKTKTYQVAHMKSKDNRIKLMNEILNGIKVLKLYAWELAFKDKVLAIRQEELKVLKKSAYLSAVGTFTWVCTPFLVALCTFAVYVTIDENNILDAQTAFVSLALFNILRFPLNILPMVISSIVQASVSLKRLRIFLSHEELEPDSIERRPVKDGGGTNSITVRNATFTWARSDPPTLNGITFSIPEGALVAVVGQVGCGKSSLLSALLAEMDKVEGHVAIKGSVAYVPQQAWIQNDSLRENILFGCQLEEPYYRSVIQACALLPDLEILPSGDRTEIGEKGVNLSGGQKQRVSLARAVYSNADIYLFDDPLSAVDAHVGKHIFENVIGPKGMLKNKTRILVTHSMSYLPQVDVIIVMSGGKISEMGSYQELLARDGAFAEFLRTYASTEQEQDAEENGVTGVSGPGKEAKQMENGMLVTDSAGKQLQRQLSSSSSYSGDISRHHNSTAELQKAEAKKEETWKLMEADKAQTGQVKLSVYWDYMKAIGLFISFLSIFLFMCNHVSALASNYWLSLWTDDPIVNGTQEHTKVRLSVYGALGISQGIAVFGYSMAVSIGGILASRCLHVDLLHSILRSPMSFFERTPSGNLVNRFSKELDTVDSMIPEVIKMFMGSLFNVIGACIVILLATPIAAIIIPPLGLIYFFVQRFYVASSRQLKRLESVSRSPVYSHFNETLLGVSVIRAFEEQERFIHQSDLKVDENQKAYYPSIVANRWLAVRLECVGNCIVLFAALFAVISRHSLSAGLVGLSVSYSLQVTTYLNWLVRMSSEMETNIVAVERLKEYSETEKEAPWQIQETAPPSSWPQVGRVEFRNYCLRYREDLDFVLRHINVTINGGEKVGIVGRTGAGKSSLTLGLFRINESAEGEIIIDGINIAKIGLHDLRFKITIIPQDPVLFSGSLRMNLDPFSQYSDEEVWTSLELAHLKDFVSALPDKLDHECAEGGENLSVGQRQLVCLARALLRKTKILVLDEATAAVDLETDDLIQSTIRTQFEDCTVLTIAHRLNTIMDYTRVIVLDKGEIQEYGAPSDLLQQRGLFYSMAKDAGLV

SEQ ID NO: 3937 - protein, 1482 aa, Homo sapiens
MALRGFCSADGSDPLWDWNVTWNTSNPDFTKCFQNTVLVWVPCFYLWACFPFYFLYLSRHDRGYIQMTPLNKTKTALGFLLWIVCWADLFYSFWERSRGIFLAPVFLVSPTLLGITTLLATFLIQLERRKGVQSSGIMLTFWLVALVCALAILRSKIMTALKEDAQVDLFRDITFYVYFSLLLIQLVLSCFSDRSPLFSETIHDPNPCPESSASFLSRITFWWITGLIVRGYRQPLEGSDLWSLNKEDTSEQVVPVLVKNWKKECAKTRKQPVKVVYSSKDPAQPKESSKVDANEEVEALIVKSPQKEWNPSLFKVLYKTFGPYFLMSFFFKAIHDLMMFSGPQILKLLIKFVNDTKAPDWQGYFYTVLLFVTACLQTLVLHQYFHICFVSGMRIKTAVIGAVYRKALVITNSARKSSTVGEIVNLMSVDAQRFMDLATYINMIWSAPLQVILALYLLWLNLGPSVLAGVAVMVLMVPVNAVMAMKTKTYQVAHMKSKDNRIKLMNEILNGIKVLKLYAWELAFKDKVLAIRQEELKVLKKSAYLSAVGTFTWVCTPFLASVSLKRLRIFLSHEELEPDSIERRPVKDGGGTNSITVRNATFTWARSDPPTLNGITFSIPEGALVAVVGQVGCGKSSLLSALLAEMDKVEGHVAIKGSVAYVPQQAWIQNDSLRENILFGCQLEEPYYRSVIQACALLPDLEILPSGDRTEIGEKGVNLSGGQKQRVSLARAVYSNADIYLFDDPLSAVDAHVGKHIFENVIGPKGMLKNKTRILVTHSMSYLPQVDVIIVMSGGKISEMGSYQELLARDGAFAEFLRTYASTEQEQDAEENGVTGVSGPGKEAKQMENGMLVTDSAGKQLQRQLSSSSSYSGDISRHHNSTAELQKAEAKKEETWKLMEADKAQTGQVKLSVYWDYMKAIGLFISFLSIFLFMCNHVSALASNYWLSLWTDDPIVNGTQEHTKVRLSVYGALGISQGIAVFGYSMAVSIGGILASRCLHVDLLHSILRSPMSFFERTPSGNLVNRFSKELDTVDSMIPEVIKMFMGSLFNVIGACIVILLATPIAAIIIPPLGLIYFFVQRFYVASSRQLKRLESVSRSPVYSHFNETLLGVSVIRAFEEQERFIHQSDLKVDENQKAYYPSIVANRWLAVRLECVGNCIVLFAALFAVISRHSLSAGLVGLSVSYSLQVTTYLNWLVRMSSEMETNIVAVERLKEYSETEKEAPWQIQETAPPSSWPQVGRVEFRNYCLRYREDLDFVLRHINVTINGGEKVGIVGRTGAGKSSLTLGLFRINESAEGEIIIDGINIAKIGLHDLRFKITIIPQDPVLFSGSLRMNLDPFSQYSDEEVWTSLELAHLKDFVSALPDKLDHECAEGGENLSVGQRQLVCLARALLRKTKILVLDEATAAVDLETDDLIQSTIRTQFEDCTVLTIAHRLNTIMDYTRVIVLDKGEIQEYGAPSDLLQQRGLFYSMAKDAGLV

SEQ ID NO: 3938 - protein, 389 aa, Homo sapiens
MIRNGRGAAGGAEQPGPGGRRAVRVWCDGCYDMVHYGHSNQLRQARAMGDYLIVGVHTDEEIAKHKGPPVFTQEERYKMVQAIKWVDEVVPAAPYVTTLETLDKYNCDFCVHGNDITLTVDGRDTYEEVKQAGRYRECKRTQGVSTTDLVGRMLLVTKAHHSSQEMSSEYREYADSFGKCPGGRNPWTGVSQFLQTSQKIIQFASGKEPQPGETVIYVAGAFDLFHIGHVDFLEKVHRLAERPYIIAGLHFDQEVNHYKGKNYPIMNLHERTLSVLACRYVSEVVIGAPYAVTAELLSHFKVDLVCHGKTEIIPDRDGSDPYQEPKRRGIFRQIDSGSNLTTDLIVQRIITNRLEYEARNQKKEAKELAFLEAARQQAAQPLGERDGDF

SEQ ID NO: 3939 - protein, 227 aa, Homo sapiens
MAWKSGGASHSELIHNLRKNGIIKTDKVFEVMLATDRSHYAKCNPYMDSPQSIGFQATISAPHMHAYALELLFDQLHEGAKALDVGSGSGILTACFARMVGCTGKVIGIDHIKELVDDSVNNVRKDDPTLLSSGRVQLVVGDGRMGYAEEAPYDAIHVGAAAPVVPQALIDQLKPGGRLILPVGPAGGNQMLEQYDKLQDGSIKMKPLMGVIYVPLTDKEKQWSRWK

SEQ ID NO: 3940 - protein, 250 aa, Homo sapiens
MAAAGLALLCRRVSSALKSSRSLITPQVPACTGFFLSLLPKSTPNVTSFHQYRLLHTTLSRKGLEEFFDDPKNWGQEKVKSGAAWTCQQLRNKSNEDLHKLWYVLLKERNMLLTLEQEAKRQRLPMPSPERLDKVVDSMDALDKVVQEREDALRLLQTGQERARPGAWRRDIFGRIIWHKFKQWVIPWHLNKRYNRKRFFALPYVDHFLRLEREKRARIKARKENLERKKAKILLKKFPHLAEAQKSSLV

SEQ ID NO: 3941 - protein, 140 aa, Homo sapiens
MLLTLEQEAKRQRLPMPSPERLDKVVDSMDALDKVVQEREDALRLLQTGQERARPGAWRRDIFGRIIWHKFKQWVIPWHLNKRYNRKRFFALPYVDHFLRLEREKRARIKARKENLERKKAKILLKKFPHLAEAQKSSLV

SEQ ID NO: 3942 - protein, 165 aa, Homo sapiens
MNPRDKQVSRFSPLKDVYTWVALAGIQRSGSPGRTRSAARRMESNTSSSLENLATAPVNQIQETISDNCVVIFSKTSCSYCTMAKKLFHDMNVNYKVVELDLLEYGNQFQDALYKMTGERTVPRIFVNGTFIGGATDTHRLHKEGKLLPLVHQCYLKKSKRKEFQ

SEQ ID NO: 3943 - protein, 164 aa, Homo sapiens
MIWRRAALAGTRLVWSRSGSAGWLDRAAGAAGAAAAAASGMESNTSSSLENLATAPVNQIQETISDNCVVIFSKTSCSYCTMAKKLFHDMNVNYKVVELDLLEYGNQFQDALYKMTGERTVPRIFVNGTFIGGATDTHRLHKEGKLLPLVHQCYLKKSKRKEFQ

SEQ ID NO: 3944 - protein, 693 aa, Homo sapiens
MDRPDEGPPAKTRRLSSSESPQRDPPPPPPPPPLLRLPLPPPQQRPRLQEETEAAQVLADMRGVGLGPALPPPPPYVILEEGGIRAYFTLGAECPGWDSTIESGYGEAPPPTESLEALPTPEASGGSLEIDFQVVQSSSFGGEGALETCSAVGWAPQRLVDPKSKEEAIIIVEDEDEDERESMRSSRRRRRRRRRKQRKVKRESRERNAERMESILQALEDIQLDLEAVNIKAGKAFLRLKRKFIQMRRPFLERRDLIIQHIPGFWVKAFLNHPRISILINRRDEDIFRYLTNLQVQDLRHISMGYKMKLYFQTNPYFTNMVIVKEFQRNRSGRLVSHSTPIRWHRGQEPQARRHGNQDASHSFFSWFSNHSLPEADRIAEIIKNDLWVNPLRYYLRERGSRIKRKKQEMKKRKTRGRCEVVIMEDAPDYYAVEDIFSEISDIDETIHDIKISDFMETTDYFETTDNEITDINENICDSENPDHNEVPNNETTDNNESADDHETTDNNESADDNNENPEDNNKNTDDNEENPNNNENTYGNNFFKGGFWGSHGNNQDSSDSDNEADEASDDEDNDGNEGDNEGSDDDGNEGDNEGSDDDDRDIEYYEKVIEDFDKDQADYEDVIEIISDESVEEEGIEEGIQQDEDIYEEGNYEEEGSEDVWEEGEDSDDSDLEDVLQVPNGWANPGKRGKTG

SEQ ID NO: 3945 - protein, 876 aa, Homo sapiens
MGDSDDEYDRRRRDKFRRERSDYDRSRERDERRRGDDWNDREWDRGRERRSRGEYRDYDRNRRERFSPPRHELSPPQKRMRRDWDEHSSDPYHSGYEMPYAGGGGGPTYGPPQPWGHPDVHIMQHHVLPIQARLGSIAEIDLGVPPPVMKTFKEFLLSLDDSVDETEAVKRYNDYKLDFRRQQMQDFFLAHKDEEWFRSKYHPDEVGKRRQEARGALQNRLRVFLSLMETGWFDNLLLDIDKADAIVKMLDAAVIKMEGGTENDLRILEQEEEEEQAGKPGEPSKKEEGRAGAGLGDGERKTNDKDEKKEDGKQAENDSSNDDKTKKSEGDGDKEEKKEDSEKEAKKSSKKRNRKHSGDDSFDEGSVSESESESESGQAEEEKEEAEEALKEKEKPKEEEWEKPKDAAGLECKPRPLHKTCSLFMRNIAPNISRAEIISLCKRYPGFMRVALSEPQPERRFFRRGWVTFDRSVNIKEICWNLQNIRLRECELSPGVNRDLTRRVRNINGITQHKQIVRNDIKLAAKLIHTLDDRTQLWASEPGTPPLPTSLPSQNPILKNITDYLIEEVSAEEEELLGSSGGAPPEEPPKEGNPAEINVERDEKLIKVLDKLLLYLRIVHSLDYYNTCEYPNEDEMPNRCGIIHVRGPMPPNRISHGEVLEWQKTFEEKLTPLLSVRESLSEEEAQKMGRKDPEQEVEKFVTSNTQELGKDKWLCPLSGKKFKGPEFVRKHIFNKHAEKIEEVKKEVAFFNNFLTDAKRPALPEIKPAQPPGPAQILPPGLTPGLPYPHQTPQGLMPYGQPRPPILGYGAGAVRPAVPTGGPPYPHAPYGAGRGNYDAFRGQGGYPGKPRNRMVRGDPRAIVEYRDLDAPDDVDFF

SEQ ID NO: 3946 - protein, 796 aa, Homo sapiens
MRRDWDEHSSDPYHSGYEMPYAGGGGGPTYGPPQPWGHPDVHIMQHHVLPIQARLGSIAEIDLGVPPPVMKTFKEFLLSLDDSVDETEAVKRYNDYKLDFRRQQMQDFFLAHKDEEWFRSKYHPDEVGKRRQEARGALQNRLRVFLSLMETGWFDNLLLDIDKADAIVKMLDAAVIKMEGGTENDLRILEQEEEEEQAGKPGEPSKKEEGRAGAGLGDGERKTNDKDEKKEDGKQAENDSSNDDKTKKSEGDGDKEEKKEDSEKEAKKSSKKRNRKHSGDDSFDEGSVSESESESESGQAEEEKEEAEALKEKEKPKEEEWEKPKDAAGLECKPRPLHKTCSLFMRNIAPNISRAEIISLCKRYPGFMRVALSEPQPERRFFRRGWVTFDRSVNIKEICWNLQNIRLRECELSPGVNRDLTRRVRNINGITQHKQIVRNDIKLAAKLIHTLDDRTQLWASEPGTPPLPTSLPSQNPILKNITDYLIEEVSAEEEELLGSSGGAPPEEPPKEGNPAEINVERDEKLIKVLDKLLLYLRIVHSLDYYNTCEYPNEDEMPNRCGIIHVRGPMPPNRISHGEVLEWQKTFEEKLTPLLSVRESLSEEEAQKMGRKDPEQEVEKFVTSNTQELGKDKWLCPLSGKKFKGPEFVRKHIFNKHAEKIEEVKKEVAFFNNFLTDAKRPALPEIKPAQPPGPAQILPPGLTPGLPYPHQTPQGLMPYGQPRPPILGYGAGAVRPAVPTGGPPYPHAPYGAGRGNYDAFRGQGGYPGKPRNRMVRGDPRAIVEYRDLDAPDDVDFF

SEQ ID NO: 3947 - protein, 1067 aa, Homo sapiens
MASPTSTNPAHAHFESFLQAQLCQDVLSSFQELCGALGLEPGGGLPQYHKIKDQLNYWSAKSLWTKLDKRAGQPVYQQGRACTSTKCLVVGAGPCGLRVAVELALLGARVVLVEKRTKFSRHNVLHLWPFTIHDLRALGAKKFYGRFCTGTLDHISIRQLQLLLLKVALLLGVEIHWGVTFTGLQPPPRKGSGWRAQLQPNPPAQLANYEFDVLISAAGGKFVPEGFKVREMRGKLAIGITANFVNGRTVEETQVPEISGVARIYNQSFFQSLLKATGIDLENIVYYKDDTHYFVMTAKKQCLLRLGVLRQDWPDTNRLLGSANVVPEALQRFTRAAADFATHGKLGKLEFAQDAHGQPDVSAFDFTSMMRAESSARVQEKHGARLLLGLVGDCLVEPFWPLGTGVARGFLAAFDAAWMVKRWAEGAESLEVLAERESLYQLLSQTSPENMHRNVAQYGLDPATRYPNLNLRAVTPNQVRDLYDVLAKEPVQRNNDKTDTGMPATGSAGTQEELLRWCQEQTAGYPGVHVSDLSSSWADGLALCALVYRLQPGLLEPSELQGLGALEATAWALKVAENELGITPVVSAQAVVAGSDPLGLIAYLSHFHSAFKSMAHSPGPVSQASPGTSSAVLFLSKLQRTLQRSRAKENAEDAGGKKLRLEMEAETPSTEVPPDPEPGVPLTPPSQHQEAGAGDLCALCGEHLYVLERLCVNGHFFHRSCFRCHTCEATLWPGGYEQHPGDGHFYCLQHLPQTDHKKEGSDRGPESPELPTPSENSMPPGLSTPTASQEGAGPVPDPSQPTRRQIRLSSPERQRLSSLNLTPDPEMEPPPKPPRSCSALARHALESSFVGWGLPVQSPQALVAMEKEEKESPFSSEEEEEDVPLDSDVEQALQTFAKTSGTMNNYPTWRRTLLRRAKEEEMKRFCKAQTIQRRLNEIEAALRELEAEGVKLELALRRQSSSPEQQKKLWVGQLLQLVDKKNSLVAEEAELMITVQELNLEEKQWQLDQELRGYMNREENLKTAADRQAEDQVLRKLVDLVNQRDALIRFQEERRLSELALGTGAQG

SEQ ID NO: 3948 - protein, 142 aa, Homo sapiens
MSDSLVVCEVDPELTEKLRKFRFRKETDNAAIIMKVDKDRQMVVLEEEFQNISPEELKMELPERQPRFVVYSYKYVHDDGRVSYPLCFIFSSPVGCKPEQQMMYAGSKNRLVQTAELTKVFEIRTTDDLTEAWLQEKLSFFR

SEQ ID NO: 3949 - protein, 175 aa, Homo sapiens
MWLYRNPYVEAEYFPTKPMFVIAFLSPLSLIFLAKFLKKADTRDSRQACLAASLALALNGVFTNTIKLIVGRPRPDFFYRCFPDGLAHSDLMCTGDKDVVNEGRKSFPSGHSSFAFAGLAFASFYLAGKLHCFTPQGRGKSWRFCAFLSPLLFAAVIALSRTCDYKHHWQGPFKW

SEQ ID NO: 3950 - protein, 323 aa, Homo sapiens
MGLSNILFVMAFLLSGAAPLKIQAYFNETADLPCQFANSQNQSLSELVVFWQDQENLVLNEVYLGKEKFDSVHSKYMGRTSFDSDSWTLRLHNLQIKDKGLYQCIIHHKKPTGMIRIHQMNSELSVLANFSQPEIVPISNITENVYINLTCSSIHGYPEPKKMSVLLRTKNSTIEYDGIMQKSQDNVTELYDVSISLSVSFPDVTSNMTIFCILETDKTRLLSSPFSIELEDPQPPPDHIPWITAVLPTVIICVMVFCLILWKWKKKKRPRNSYKCGTNTMEREESEQTKKREKIHIPERSDEAQRVFKSSKTSSCDKSDTCF

SEQ ID NO: 3951 - protein, 329 aa, Homo sapiens
MDPQCTMGLSNILFVMAFLLSGAAPLKIQAYFNETADLPCQFANSQNQSLSELVVFWQDQENLVLNEVYLGKEKFDSVHSKYMGRTSFDSDSWTLRLHNLQIKDKGLYQCIIHHKKPTGMIRIHQMNSELSVLANFSQPEIVPISNITENVYINLTCSSIHGYPEPKKMSVLLRTKNSTIEYDGIMQKSQDNVTELYDVSISLSVSFPDVTSNMTIFCILETDKTRLLSSPFSIELEDPQPPPDHIPWITAVLPTVIICVMVFCLILWKWKKKKRPRNSYKCGTNTMEREESEQTKKREKIHIPERSDEAQRVFKSSKTSSCDKSDTCF

SEQ ID NO: 3952 - protein, 730 aa, Homo sapiens
MQLFEQPCPGEDPRPGGQIGEVELSSYTPPAGVPGKPAAPHFLPVLCSVSPSGSRVPHDLLGGSGGFTLEDALFGLLFGADATLLQSPVVLCGLPDGQLCCVILKALVTSRSAPGDPNALVKILHHLEEPVIFIGALKTEPQAAEAAENFLPDEDVHCDCLVAFGHHGRMLAIKASWDESGKLVPELREYCLPGPVLCAACGGGGRVYHSTPSDLCVVDLSRGSTPLGPEQPEEGPGGLPPMLCPASLNICSVVSLSASPRTHEGGTKLLALSAKGRLMTCSLDLDSEMPGPARMTTESAGQKIKELLSGIGNISERVSFLKKAVDQRNKALTSLNEAMNVSCALLSSGTGPRPISCTTSTTWSRLQTQDVLMATCVLENSSSFSLDQGWTLCIQVLTSSCALDLDSACSAITYTIPVDQLGPGARREVTLPLGPGENGGLDLPVTVSCTLFYSLREVVGGALAPSDSEDPFLDECPSDVLPEQEGVCLPLSRHTVDMLQCLCFPGLAPPHTRAPSPLGPTRDPVATFLETCREPGSQPAGPASLRAEYLPPSVASIKVSAELLRAALKDGHSGVPLCCATLQWLLAENAAVDVVRARALSSIQGVAPDGANVHLIVREVAMTDLCPAGPIQAVEIQVESSSLADICRAHHAVVGRMQTMVTEQAAQGSSAPDLRVQYLRQIHANHETLLREVQTLRDRLCTEDEASSCATAQRLLQVYRQLRHPSLILL

SEQ ID NO: 3953 - protein, 127 aa, Homo sapiens
MPKSKELVSSGSSGSDSDSEVDKKLKRKKQVAPEKPVKKQKTGETSRALSSSKQSSSSRDDNMFQIGKMRYVSVRDFKGKVLIDIREYWMDPEGEMKPGRKGISLNPEQWSQLKEQISDIDDAVRKL

SEQ ID NO: 3954 - protein, 1087 aa, Homo sapiens
MTTESGSDSESKPDQEAEPQEAAGAQGRAGAPVPEPPKEEQQQALEQFAAAAAHSTPVRREVTDKEQEFAARAAKQLEYQQLEDDKLSQKSSSSKLSRSPLKIVKKPKSMQCKVILLDGSEYTCDVEKRSRGQVLFDKVCEHLNLLEKDYFGLTYRDAENQKNWLDPAKEIKKQVRSGAWHFSFNVKFYPPDPAQLSEDITRYYLCLQLRDDIVSGRLPCSFVTLALLGSYTVQSELGDYDPDECGSDYISEFRFAPNHTKELEDKVIELHKSHRGMTPAEAEMHFLENAKKLSMYGVDLHHAKDSEGVEIMLGVCASGLLIYRDRLRINRFAWPKVLKISYKRNNFYIKIRPGEFEQFESTIGFKLPNHRAAKRLWKVCVEHHTFFRLLLPEAPPKKFLTLGSKFRYSGRTQAQTRRASALIDRPAPYFERSSSKRYTMSRSLDGEVGTGQYATTKGISQTNLITTVTPEKKAEEERDEEEDKRRKGEEVTPISAIRHEGKSPGLGTDSCPLSPPSTHCAPTSPTELRRRCKENDCKLPGYEPSRAEHLPGEPALDSDGPGRPYLGDQDVAFSYRQQTGKGTTLFSFSLQLPESFPSLLDDDGYLSFPNLSETNLLPQSLQHYLPIRSPSLVPCFLFIFFFLLSASFSVPYALTLSFPLALCLCYLEPKAASLSASLDNDPSDSSEEETDSERTDTAADGETTATESDQEEDAELKAQELEKTQDDLMKHQTNISELKRTFLETSTDTAVTNEWEKRLSTSPVRLAARQEDAPMIEPLVPEETKQSSGEKLMDGSEIFSLLESARKPTEFIGGVTSTSQSWVQKMETKTESSGIETEPTVHHLPLSTEKVVQETVLVEERRVVHASGDASYSAGDSGDAAAQPAFTGIKGKEGSALTEGAKEEGGEEVAKAVLEQEETAAASRERQEEQSAAIHISETLEQKPHFESSTVKTETISFGSVSPGGVKLEISTKEVPVVHTETKTITYESSQVDPGTDLEPGVLMSAQTITSETTSTTTTTHITKTVKGGISETRIEKRIVITGDADIDHDQALAQAIKEAKEQHPDMSVTKVVVHKETEITPEDGED

SEQ ID NO: 3955 - protein, 562 aa, Homo sapiens
MADLANEEKPAIAPPVFVFQKDKGQKSPAEQKNLSDSGEEPRGEAEAPHHGTGHPESAGEHALEPPAPAGASASTPPPPAPEAQLPPFPRELAGRSAGGSSPEGGEDSDREDGNYCPPVKRERTSSLTQFPPSQSEERSSGFRLKPPTLIHGQAPSAGLPSQKPKEQQRSVLRPAVLQAPQPKALSQTVPSSGTNGVSLPADCTGAVPAASPDTAAWRSPSEAADEEKEPQKNESSNASEEEACEKKDPATQQAFVFGQNLRDRVKLINESVDEADMENAGHPSADTPTATNYFLQYISSSLENSTNSADASSNKFVFGQNMSERVLSPPKLNEVSSDANRENAAAESGSESSSQEATPEKGSLAESAAAYTKATARKCLLEKVEVITGEEAESNVLQMQCKLFVFDKTSQSWVERGRGLLRLNDMASTDDGTLQSRLVMRTQGSLRLILNTKLWAQMQIDKASEKSIRITAMDTEDQGVKVFLISASSKDTGQLYAALHHRILALRSRVEQEQEAKMPAPEPGAAPSNEEDDSDDDDVLAPSGATAAGAGDEGDGQTTGST

SEQ ID NO: 3956 - protein, 499 aa, Homo sapiens
MADLANEEKPAIAPPVFVFQKDKGQKRSAGGSSPEGGEDSDREDGNYCPPVKRERTSSLTQFPPSQSEERSSGFRLKPPTLIHGQAPSAGLPSQKPKEQQRSVLRPAVLQAPQPKALSQTVPSSGTNGVSLPADCTGAVPAASPDTAAWRSPSEAADEVCALEEKEPQKNESSNASEEEACEKKDPATQQAFVFGQNLRDRVKLINESVDEADMENAGHPSADTPTATNYFLQYISSSLENSTNSADASSNKFVFGQNMSERVLSPPKLNEVSSDANRENAAAESGSESPFQEATPEKESLAESAAAYTKATARKCLLEKVEVITGEEAESNVLQMQCKLFVFDKTSQSWVERGRGLLRLNDMASTDDGTLQSRLVMRTQGSLRLILNTKLWAQMQIDKASEKSIRITAMDTEDQGVKVFLISASSKDTGQLYAALHHRILALRSRVEQEQEAKMPAPEPGAAPSNEEDDSDDDDVLAPSGATAAGAGDEGDGQTTGST

SEQ ID NO: 3957 - protein, 221 aa, Homo sapiens
MENAGHPSADTPTATNYFLQYISSRCVSRCQRPAWHGDAGGREGFCQRGVCGPRARLRPRIQVALRPLSLIPHSGHNLGWARVVGLVLGFTGRLRQDQSSVGLSRGPWRLQPSPWSVPSVLWTSCPEQNRRGQRRLRRPLILGLGTWGKDLIMSLTDMAGGKATHGPAAPPGVSEESVSRLGDGRVEQVEGGFPHAVGPLHQGELRVNVFNGTGRCVASCL

SEQ ID NO: 3958 - protein, 567 aa, Homo sapiens
MADLANEEKPAIAPPVFVFQKDKGQKSPAEQKNLSDSGEEPRGEAEAPHHGTGHPESAGEHALEPPAPAGASASTPPPPAPEAQLPPFPRELAGRSAGGSSPEGGEDSDREDGNYCPPVKRERTSSLTQFPPSQSEERSSGFRLKPPTLIHGQAPSAGLPSQKPKEQQRSVLRPAVLQAPQPKALSQTVPSSGTNGVSLPADCTGAVPAASPDTAAWRSPSEAADEVCALEEKEPQKNESSNASEEEACEKKDPATQQAFVFGQNLRDRVKLINESVDEADMENAGHPSADTPTATNYFLQYISSSLENSTNSADASSNKFVFGQNMSERVLSPPKLNEVSSDANRENAAAESGSESSSQEATPEKESLAESAAAYTKATARKCLLEKVEVITGEEAESNVLQMQCKLFVFDKTSQSWVERGRGLLRLNDMASTDDGTLQSRLVMRTQGSLRLILNTKLWAQMQIDKASEKSIRITAMDTEDQGVKVFLISASSKDTGQLYAALHHRILALRSRVEQEQEAKMPAPEPGAAPSNEEDDSDDDDVLAPSGATAAGAGDEGDGQTTGST

SEQ ID NO: 3959 - protein, 331 aa, Homo sapiens
MSRARGALCRACLALAAALAALLLLPLPLPRAPAPARTPAPAPRAPPSRPAAPSLRPDDVFIAVKTTRKNHGPRLRLLLRTWISRARQQTFIFTDGDDPELELQGGDRVINTNCSAVRTRQALCCKMSVEYDKFIESGRKWFCHVDDDNYVNARSLLHLLSSFSPSQDVYLGRPSLDHPIEATERVQGGRTVTTVKFWFATGGAGFCLSRGLALKMSPWASLGSFMSTAEQVRLPDDCTVGYIVEGLLGARLLHSPLFHSHLENLQRLPPDTLLQQVTLSHGGPENPHNVVNVAGGFSLHQDPTRFKSIHCLLYPDTDWCPRQKQGAPTSR

SEQ ID NO: 3960 - protein, 151 aa, Homo sapiens
MPRGSRSRTSRMAPPASRAPQMRAAPRPAPVAQPPAAAPPSAVGSSAAAPRQPGLMAQMATTAAGVAVGSAVGHTLGHAITGGFSGGSNAEPARPDITYQEPQGTQPAQQQQPCLYEIKQFLECAQNQGDIKLCEGFNEVLKQCRLANGLA

SEQ ID NO: 3961 - protein, 202 aa, Homo sapiens
MAAPWRRWPTGLLAVLRPLLTCRPLQGTTLQRDVLLFEHDRGRFFTILGLFCAGQGVFWASMAVAAVSRPPVPVQPLDAEVPNRGPFDLRSALWRYGLAVGCGAIGALVLGAGLLFSLRSVRSVVLRAGGQQVTLTTHAPFGLGAHFTVPLKQVSCMAHRGEVPAMLPLKVKGRRFYFLLDKTGHFPNTKLFDNTVGAYRSL

SEQ ID NO: 3962 - protein, 202 aa, Homo sapiens; identical to SEQ ID NO: 3961

SEQ ID NO: 3963 - protein, 175 aa, Homo sapiens
MAAVSMSVVLRQTLWRRRAVAVAALSVSRVPTRSLRTSTWRLAQDQTQDTQLITVDEKLDITTLTGVPEEHIKTRKVRIFVPARNNMQSGVNNTKKWKMEFDTRERWENPLMGWASTADPLSNMVLTFSTKEDAVSFAEKNGWSYDIEERKVPKPKSKSYGANFSWNKRTRVSTK

SEQ ID NO: 3964 - protein, 919 aa, Homo sapiens
MLIHKTEDVNTLDSEKRTPLHVAAFLGDAEIIELLILSGARVNAKDNMWLTPLHRAVASRSEEAVQVLIKHSADVNARDKNWQTPLHVAAANKAVKCAEVIIPLLSSVNVSDRGGRTALHHAALNGHVEMVNLLLAKGANINAFDKKDRRALHWAAYMGHLDVVALLINHGAEVTCKDKKGYTPLHAAASNGQINVVKHLLNLGVEIDEINVYGNTALHIACYNGQDAVVNELIDYGANVNQPNNNGFTPLHFAAASTHGALCLELLVNNGADVNIQSKDGKSPLHMTAVHGRFTRSQTLIQNGGEIDCVDKDGNTPLHVAARYGHELLINTLRTSGADTAKCGIHSMFPLHLAALNAHSDCCRKLLSSGFEIDTPDKFGRTCLHAAAAGGNVECIKLLQSSGADFHKKDKCGRTPLHYAAANCHFHCIETLVTTGANVNETDDWGRTALHYAAASDMDRNKTILGNAHDNSEELERARELKEKEATLCLEFLLQNDANPSIRDKEGYNSIHYAAAYGHRQCLELLLERTNSGFEESDSGATKSPLHLAAYNGHHQALEVLLQSLVDLDIRDEKGRTALDLAAFKGHTECVEALINPGASIFVKDNVTKRTPLHASVINGHTLCLRLLLEIADNPEAVDVKDAKGQTPLMLAVAYGHIDAVSLLLEKEANVDTVDILGCTALHRGIMTGHEECVQMLLEQEVSILCKDSRGRTPLHYAAARGHATWLSELLQMALSEEDCCFKDNQGYTPLHWACYNGNENCIEVLLEQKCFRKFIGNPFTPLHCAIINDHGNCASLLLGAIDSSIVSCRDDKGRTPLRAAAFADHVECLQLLLRHSAPVNAVDNSGKTALMMAAENGQAGAVDILVNSAQADLTVKDKDLNTPLHLACSKGHEKCALLILDKIQDESLINEKNNALQT

SEQ ID NO: 3965 - protein, 1041 aa, Homo sapiens
MATPAGLERWVQDELHSVLGLSERHVAQFLIGTAQRCTSAEEFVQRLRDTDTLDLSGPARDFALRLWNKVPRKAVVEKPARAAEREARALLEKNRSYRLLEDSEESSEETVSRAGSSLQKKRKKRKHLRKKREEEEEEEASEKGKKKTGGSKQQTEKPESEDEWERTERERLQDLEERDAFAERVRQRDKDRTRNVLERSDKKAYEEAQKRLKMAEEDRKAMIPELRKKSRREYLAKREREKLEDLEAELADEEFLFGDVELSRHERQELKYKRRVRDLAREYRAAGEQEKLEATNRYHMPKETRGQPARAVDLVEEESGAPGEEQRRWEEARLGAASLKFGARDAASQEPKYQLVLEEEETIEFVRATQLQGDEEPSAPPTSTQAQQKESIQAVRRSLPVFPFREELLAAIANHQVLIIEGETGSGKTTQIPQYLFEEGYTNKGMKIACTQPRRVAAMSVAARVAREMGVKLGNEVGYSIRFEDCTSERTVLRYMTDGMLLREFLSEPDLASYSVVMVDEAHERTLHTDILFGLIKDVARFRPELKVLVASATMDTARFSTFFDDAPVFRIPGRRFPVDIFYTKAPEADYLEACVVSVLQIHVTQPPGDILVFLTGQEEIEAACEMLQDPCRRLGSKIRELLVLPIYANLPSDMQARIFQPTPPGARKVVVATNIAETSPTIEGIIYVLDPGFCKQKSYNPRTGMESLTVTPCSKASANQRAGRAGRVAAGKCFRLYTAWAYQHELEETTVPEIQRTSLGNVVLLLKSLGIHDLMHFDFLDPPPYETLLLTLEQLYALGALNHLGELTTSGRKMAELPVDPMLSKMILASEKYSCSEEILTVAAMLSVNNSIFYRPKDKVVHADNARVNFFLPGGDHLVLLNVYTQWAESGYSSQWCCENFVQFRSMRRARDVREQLEGLLERVEVGLSSCQGDYIRVRKAITAGYFYHTARLTRSGYRTVKQQQTVFIHPNSSLFEQQPRWLLYHELVLTTKEFMRQVLEIESSWLLEVAPHYYKAKELEDPHAKKMPKKIGKTREELG

SEQ ID NO: 3966 - protein, 373 aa, Homo sapiens
MLKRKPSNVSEKEKHQKPKRSSSFGNFDRFRNNSLSKPDDSTEAHEGDPTNGSGEQSKTSNNGGGLGKKMRAISWTMKKKVGKKYIKALSEEKDEEDGENAHPYRNSDPVIGTHTEKVSLKASDSMDSLYSGQSSSSGITSCSDGTSNRDSFRLDDDGPYSGPFCGRARVHTDFTPSPYDTDSLKIKKGDIIDIICKTPMGMWTGMLNNKVGNFKFIYVDVISEEEAAPKKIKANRRSNSKKSKTLQEFLERIHLQEYTSTLLLNGYETLEDLKDIKESHLIELNIENPDDRRRLLSAAENFLEEEIIQEQENEPEPLSLSSDISLNKSQLDDCPRDSGCYISSGNSDNGKEDLESENLSDMVHKIIITEPSD

SEQ ID NO: 3967 - protein, 286 aa, Homo sapiens
MRLLPRLLLLLLLVFPATVLFRGGPRGSLAVAQDLTEDEETVEDSIIEDEDDEAEVEEDEPTDLVEDKEEEDVSGEPEASPSADTTILFVKGEDFPANNIVKFLVGFTNKGTEDFIVESLDASFRYPQDHQFYIQNFTALPLNTVVPPQRQATFEYSFIPAEPMGGRPFGLVINLNYKDLNGNVFQDAVFNQTVTVIEREDGLDGETIFMYMFLAGLGLLVIVGLHQLLESRKRKRPIQKVEMGTSSQNDVDMSWIPQETLNQINKASPRRLPRKRAQKRSVGSDE

SEQ ID NO: 3968 - protein, 997 aa, Homo sapiens
MDDQPGEKELVKRSQLDGEGDGPLSNQLSASSTINPVPLVGLQKPEMSLPVKPGQGDSEASSPFTPVADEDSVVFSKLTYLGCASVNAPRSEVEALRMMSILRSQCQISLDVTLSVPNVSEGIVRLLDPQTNTEIANYPIYKILFCVRGHDGTPESDCFAFTESHYNAELFRIHVFRCEIQEAVSRILYSFATAFRRSAKQTPLSATAAPQTPDSDIFTFSVSLEIKEDDGKGYFSAVPKDKDRQCFKLRQGIDKKIVIYVQQTTNKELAIERCFGLLLSPGKDVRNSDMHLLDLESMGKSSDGKSYVITGSWNPKSPHFQVVNEETPKDKVLFMTTAVDLVITEVQEPVRFLLETKVRVCSPNERLFWPFSKRSTTENFFLKLKQIKQRERKNNTDTLYEVVCLESESERERRKTTASPSVRLPQSGSQSSVIPSPPEDDEEEDNDEPLLSGSGDVSKECAEKILETWGELLSKWHLNLNVRPKQLSSLVRNGVPEALRGEVWQLLAGCHNNDHLVEKYRILITKESPQDSAITRDINRTFPAHDYFKDTGGDGQDSLYKICKAYSVYDEEIGYCQGQSFLAAVLLLHMPEEQAFSVLVKIMFDYGLRELFKQNFEDLHCKFYQLERLMQEYIPDLYNHFLDISLEAHMYASQWFLTLFTAKFPLYMVFHIIDLLLCEGISVIFNVALGLLKTSKDDLLLTDFEGALKFFRVQLPKRYRSEENAKKLMELACNMKISQKKLKKYEKEYHTMREQQAQQEDPIERFERENRRLQEANMRLEQENDDLAHELVTSKIALRKDLDNAEEKADALNKELLMTKQKLIDAEEEKRRLEEESAQLKEMCRRELDKAESEIKKNSSIIGDYKQICSQLSERLEKQQTANKVEIEKIRQKVDDCERCREFFNKEGRVKGISSTKEVLDEDTDEEKETLKNQLREMELELAQTKLQLVEAECKIQDLEHHLGLALNEVQAAKKTWFNRTLSSIKTATGVQGKETC

SEQ ID NO: 3969 - protein, 648 aa, Homo sapiens
MEGAGYRVVFEKGGVYLHTSAKKYQDRDSLIAGVIRVVEKDNDVLLHWAPVEEAGDSTQILFSKKDSSGGDSCASEEEPTFDPGYEPDWAVISTVRPQPCHSEPTRGAEPSCPQGSWAFSVSLGELKSIRRSKPGLSWAYLVLVTQAGGSLPALHFHRGGTRALLRVLSRYLLLASSPQDSRLYLVFPHDSSALSNSFHHLQLFDQDSSNVVSRFLQDPYSTTFSSFSRVTNFFRGALQPQPEGAASDLPPPPDDEPEPGFEVISCVELGPRPTVERGPPVTEEEWARHVGPEGRLQQVPELKNRIFSGGLSPSLRREAWKFLLGYLSWEGTAEEHKAHIRKKTDEYFRMKLQWKSVSPEQERRNSLLHGYRSLIERDVSRTDRTNKFYEGPENPGLGLLNDILLTYCMYHFDLGYVQGMSDLLSPILYVIQNEVDAFWCFCGFMELVQGNFEESQETMKRQLGRLLLLLRVLDPLLCDFLDSQDSGSLCFCFRWLLIWFKREFPFPDVLRLWEVLWTGLPGPNLHLLVACAILDMERDTLMLSGFGSNEILKHINELTMKLSVEDVLTRAEALHRQLTACPELPHNVQEILGLAPPAEPHSPSPTASPLPLSPTRAPPTPPPSTDTAPQPDSSLEILPEEEDEGADS

SEQ ID NO: 3970 - protein, 434 aa, Homo sapiens
MDIDKDLEAPLYLTPEGWSLFLQRYYQVVHEGAELRHLDTQVQRCEDILQQLQAVVPQIDMEGDRNIWIVKPGAKSRGRGIMCMDHLEEMLKLVNGNPVVMKDGKWVVQKYIERPLLIFGTKFDLRQWFLVTDWNPLTVWFYRDSYIRFSTQPFSLKNLDNSVHLCNNSIQKHLENSCHRHPLLPPDNMWSSQRFQAHLQEMGAPNAWSTIIVPGMKDAVIHALQTSQDTVQCRKASFELYGADFVFGEDFQPWLIEINASPTMAPSTAVTARLCAGVQADTLRVVIDRRLDRNCDTGAFELIYKQPAVEVPQYVGIRLLVEGFTIKKPMAMCHRRMGVRPAVPLLTQRGSGEARHHFPSLHTKAQLPSPHVLRHQGQVLRRQHSKLVGTKALSTTGKALRTLPTAKVFISLPPNLDFKVAPSILKPRKVGLDL

SEQ ID NO: 3971 - protein, 352 aa, Homo sapiens
MDIDKDLEAPLYLTPEGWSLFLQRYYQVVHEGAELRHLDTQVQRCEDILQQLQAVVPQIDMEGDRNIWIVKPGAKSRGRGIMCMDHLEEMLKLVNGNPVVMKDGKWVVQKYIERPLLIFGTKFDLRQWFLVTDWNPLTVWFYRDSYIRFSTQPFSLKNLDNSVHLCNNSIQKHLENSCHRHPLLPPDNMWSSQRFQAHLQEMGAPNAWSTIIVPGMKDAVIHALQTSQDTVQCRKASFELYGADFVFGEDFQPWLIEINASPTMAPSTAVTARLCAGVQADTLRVVIDRMLDRNCDTGAFELIYKQPVTTSPASTPGPSCLLPMYSDTRARSSDDSTASWWALRPCRPQARP

SEQ ID NO: 3972 - protein, 686 aa, Homo sapiens
MKIVIRGDRNTGKTALWHRLQGRPFVEEYIPTQEIQVTSIHWSYKTTDDIVKVEVWDVVDKGKCKKRGDGLKMENDPQEAESEMALDAEFLDVYKNCNGVVMMFDITKQWTFNYILRELPKVPTHVPVCVLGNYRDMGEHRVILPDDVRDFIDNLDRPPGSSYFRYAESSMKNSFGLKYLHKFFNIPFLQLQRETLLRQLETNQLDMDATLEELSVQQETEDQNYGIFLEMMEARSRGHASPLAANGQSPSPGSQSPVVPAGAVSTGSSSPGTPQPAPQLPLNAAPPSSVPPVPPSEALPPPACPSAPAPRRSIISRLFGTSPATEAAPPPPEPVPAAEGPATVQSVEDFVPDDRLDRSFLEDTTPARDEKKVGAKAAQQDSDSDGEALGGNPMVAGFQDDVDLEDQPRGSPPLPAGPVPSQDITLSSEEEAEVAAPTKGPAPAPQQCSEPETKWSSIPASKPRRGTAPTRTAAPPWPGGVSVRTGPEKRSSTRPPAEMEPGKGEQASSSESDPEGPIAAQMLSFVMDDPDFESEGSDTQRRADDFPVRDDPSDVTDEDEGPAEPPPPPKLPLPAFRLKNDSDLFGLGLEEAGPKESSEEGKEGKTPSKEKKKKKKKGKEEEEKAAKKKSKHKKSKDKEEGKEERRRRQQRPPRSRERTAADELEAFLGGGAPGGRHPGGGDYEEL

SEQ ID NO: 3973 - protein, 293 aa, Homo sapiens
MFISLWEFFYGHFFRFWMKWLLRQMTGKCELQRIFDTYVGAQRTHRIENSLTYSKNKVLQKATHVVQSEVDKYVDDIMKEKNINPEKDASFKICMKMCLLQITGYKQLYLDVESVRKRPYDSDNLQHEELLMKLWNLLMPTKKLNARISKQWAEIGFQGDDPKTDFRGMGILGLINLVYFSENYTSEAHQILSRSNHPKLGYSYAIVGINLTEMAYSLLKSEALKFHLYNLVPGIPTMEHFHQFYCYLVYEFDKFWFEEEPESIMYFNLYREKFHEKIKGLLLDCNVALTLKV

SEQ ID NO: 3974 - protein, 346 aa, Homo sapiens
MAMVSEFLKQAWFIENEEQEYVQTVKSSKGGPGSAVSPYPTFNPSSDVAALHKAIMVKGVDEATIIDILTKRNNAQRQQIKAAYLQETGKPLDETLKKALTGHLEEVVLALLKTPAQFDADELRAAMKGLGTDEDTLIEILASRTNKEIRDINRVYREELKRDLAKDITSDTSGDFRNALLSLAKGDRSEDFGVNEDLADSDARALYEAGERRKGTDVNVFNTILTTRSYPQLRRVFQKYTKYSKHDMNKVLDLELKGDIEKCLTAIVKCATSKPAFFAEKLHQAMKGVGTRHKALIRIMVSRSEIDMNDIKAFYQKMYGISLCQAILDETKGDYEKILVALCGGN

SEQ ID NO: 3975 - protein, 164 aa, Homo sapiens
MIGKVEGGDAVLRWSSAFSLPQSPGRSAMEKWGARRVSGPPLPFRLLRPRLPLAESKYGSVCGFCNKGWAGRVSLGMGTASPGSRGGEPPGPPRESLVSLRTQGTHLGLERRNDVDLKAKPMLRTFQNGLLSAPLTGASGFGGPVGQPWGVIGEKLTGLMAGDR

SEQ ID NO: 3976 - protein, 437 aa, Homo sapiens
MASVAVDPQPSVVTRVVNLPLVSSTYDLMSSAYLSTKDQYPYLKSVCEMAENGVKTITSVAMTSALPIIQKLEPQIAVANTYACKGLDRIEERLPILNQPSTQIVANAKGAVTGAKDAVTTTVTGAKDSVASTITGVMDKTKGAVTGSVEKTKSVVSGSINTVLGSRMMQLVSSGVENALTKSELLVEQYLPLTEEELEKEAKKVEGFDLVQKPSYYVRLGSLSTKLHSRAYQQALSRVKEAKQKSQQTISQLHSTVHLIEFARKNVYSANQKIQDAQDKLYLSWVEWKRSIGYDDTDESHCAEHIESRTLAIARNLTQQLQTTCHTLLSNIQGVPQNIQDQAKHMGVMAGDIYSVFRNAASFKEVSDSLLTSSKGQLQKMKESLDDVMDYLVNNTPLNWLVGPFYPQLTESQNAQDQGAEMDKSSQETQRSEHKTH

SEQ ID NO: 3977 - protein, 796 aa, Homo sapiens
MSAAQVSSSRRQSCYLCDLPRMPWAMIWDFSEPVCRGCVNYEGADRIEFVIETARQLKRAHGCFQDGRSPGPPPPVGVKTVALSAKEAAAAAAAAAAAAAAAQQQQQQQQQQQQQQQQQQQQQQQQQLNHVDGSSKPAVLAAPSGLERYGLSAAAAAAAAAAAAVEQRSRFEYPPPPVSLGSSSHTARLPNGLGGPNGFPKPTPEEGPPELNRQSPNSSSAAASVASRRGTHGGLVTGLPNPGGGGGPQLTVPPNLLPQTLLNGPASAAVLPPPPPHALGSRGPPTPAPPGAPGGPACLGGTPGVSATSSSASSSTSSSVAEVGVGAGGKRPGSVSSTDQERELKEKQRNAEALAELSESLRNRAEEWASKPKMVRDTLLTLAGCTPYEVRFKKDHSLLGRVFAFDAVSKPGMDYELKLFIEYPTGSGNVYSSASGVAKQMYQDCMKDFGRGLSSGFKYLEYEKKHGSGDWRLLGDLLPEAVRFFKEGVPGADMLPQPYLDASCPMLPTALVSLSRAPSAPPGTGALPPAAPSGRGAAASLRKRKASPEPPDSAEGALKLGEEQQRQQWMANQSEALKLTMSAGGFAAPGHAAGGPPPPPPPLGPHSNRTTPPESAPQNGPSPMAALMSVADTLGTAHSPKDGSSVHSTTASARRNSSSPVSPASVPGQRRLASRNGDLNLQVAPPPPSAHPGMDQVHPQNIPDSPMANSGPLCCTICHERLEDTHFVQCPSVPSHKFCFPCSRESIKAQGATGEVYCPSGEKCPLVGSNVPWAFMQGEIATILAGDVKVKKERDP

SEQ ID NO: 3978 - protein, 211 aa, Homo sapiens
MAVVPLLLLGGLWSAVGASSLGVVTCGSVVKLLNTRHNVRLHSHDVRYGSGSGQQSVTGVTSVDDSNSYWRIRGKSATVCERGTPIKCGQPIRLTHVNTGRNLHSHHFTSPLSGNQEVSAFGEEGEGDYLDDWTVLCNGPYWVRDGEVRFKHSSTEVLLSVTGEQYGRPISGQKEVHGMAQPSQNNYWKAMEGIFMKPSELLKAEAHHAEL

SEQ ID NO: 3979 - protein, 505 aa, Homo sapiens
MRLRRLALFPGVALLLAAARLAAASDVLELTDDNFESRISDTGSAGLMLVEFFAPWCGHCKRLAPEYEAAATRLKGIVPLAKVDCTANTNTCNKYGVSGYPTLKIFRDGEEAGAYDGPRTADGIVSHLKKQAGPASVPLRTEEEFKKFISDKDASIVGFFDDSFSEAHSEFLKAASNLRDNYRFAHTNVESLVNEYDDNGEGIILFRPSHLTNKFEDKTVAYTEQKMTSGKIKKFIQENIFGICPHMTEDNKDLIQGKDLLIAYYDVDYEKNAKGSNYWRNRVMMVAKKFLDAGHKLNFAVASRKTFSHELSDFGLESTAGEIPVVAIRTAKGEKFVMQEEFSRDGKALERFLQDYFDGNLKRYLKSEPIPESNDGPVKVVVAENFDEIVNNENKDVLIEFYAPWCGHCKNLEPKYKELGEKLSKDPNIVIAKMDATANDVPSPYEVRGFPTIYFSPANKKLNPKKYEGGRELSDFISYLQREATNPPVIQEEKPKKKKKAQEDL

SEQ ID NO: 3980 - protein, 219 aa, Homo sapiens
MDSGTRPVGSCCSSPAGLSREYKLVMLGAGGVGKSAMTMQFISHRFPEDHDPTIEDAYKIRIRIDDEPANLDILDTAGQAEFTAMRDQYMRAGEGFIICYSITDRRSFHEVREFKQLIYRVRRTDDTPVVLVGNKSDLKQLRQVTKEEGLALAREFSCPFFETSAAYRYYIDDVFHALVREIRRKEKEAVLAMEKKSKPKNSVWKRLKSPFRKKKDSVT

SEQ ID NO: 3981 - protein, 440 aa, Homo sapiens
MSSCRGQKVAGGLRVVSPFPLCQPAGEPSQGKMRSSCVLLTALVALAAYYVYIPLPGSVSDPWKLMLLDATFRGAQQVSNLIHYLGLSHHLLALNFIIVSFGKKSAWSSAQVKVTDTDFDGVEVRVFEGPPKPEEPLKRSVVYIHGGGWALASAKIRYYDELCTAMAEELNAVIVSIEYRLVPKVYFPEQIHDVVRATKYFLKPEVLQKYMVDPGRICISGDSAGGNLAAALGQQFTQDASLKNKLKLQALIYPVLQALDFNTPSYQQNVNTPILPRYVMVKYWVDYFKGNYDFVQAMIVNNHTSLDVEEAAAVRARLNWTSLLPASFTKNYKPVVQTTGNARIVQELPQLLDARSAPLIADQAVLQLLPKTYILTCEHDVLRDDGIMYAKRLESAGVEVTLDHFEDGFHGCMIFTSWPTNFSVGIRTRNSYIKWLDQNL

SEQ ID NO: 3982 - protein, 1575 aa, Homo sapiens
MPHEELPSLQRPRYGSIVDDERLSAEEMDERRRQNIAYEYLCHLEEAKRWMEVCLVEELPPTTELEEGLRNGVYLAKLAKFFAPKMVSEKKIYDVEQTRYKKSGLHFRHTDNTVQWLRAMESIGLPKIFYPETTDVYDRKNIPRMIYCIHALSLYLFKLGIAPQIQDLLGKVDFTEEEISNMRKELEKYGIQMPSFSKIGGILANELSVDEAALHAAVIAINEAVEKGIAEQTVVTLRNPNAVLTLVDDNLAPEYQKELWDAKKKKEENARLKNSCISEEERDAYEELLTQAEIQGNINKVNRQAAVDHINAVIPEGDPENTLLALKKPEAQLPAVYPFAAAMYQNELFNLQKQNTMNYLAHEELLIAVEMLSAVALLNQALESNDLVSVQNQLRSPAIGLNNLDKAYVERYANTLLSVKLEVLSQGQDNLSWNEIQNCIDMVNAQIQEENDRVVAVGYINEAIDEGNPLRTLETLLLPTANISDVDPAHAQHYQDVLYHAKSQKLGDSESVSKVLWLDEIQQAVDEANVDEDRAKQWVTLVVDVNQCLEGKKSSDILSVLKSSTSNANDIIPECADKYYDALVKAKELKSERVSSDGSWLKLNLHKKYDYYYNTDSKESSWVTPESCFYKESWLTGKEIEDIIEEVTVGYIRENIWSASEELLLRFQATSSGPILREEFEARKSFLHEQEENVVKIQAFWKGYKQRKEYMHRRQTFIDNTDSVVKIQSWFRMATARKSYLSRLQYFRDHNNEIVKIQSLLRANKARDDYKTLVGSENPPLTVIRKFVYLLDQSDLDFQEELEVARLREEVVTKIRANQQLEKDLNLMDIKIGLLVKNRITLEDVISHSKKLNKKKGGEMEILNNTDNQGIKSLSKERRKTLETYQQLFYLLQTNPLYLAKLIFQMPQNKSTKFMDTVIFTLYNYASNQREEYLLLKLFKTALEEEIKSKVDQVQDIVTGNPTVIKMVVSFNRGARGQNTLRQLLAPVVKEIIDDKSLIINTNPVEVYKAWVNQLETQTGEASKLPYDVTTEQALTYPEVKNKLEASIENLRRVTDKVLNSIISSLDLLPYGLRYIAKVLKNSIHEKFPDATEDELLKIVGNLLYYRYMNPAIVAPDGFDIIDMTAGGQINSDQRRNLGSVAKVLQHAASNKLFEGENEHLSSMNNYLSETYQEFRKYFKEACNVPEPEEKFNMDKYTDLVTVSKPVIYISIEEIISTHSLLLEHQDAIAPEKNDLLSELLGSLGEVPTVESFLGEGAVDPNDPNKANTLSQLSKTEISLVLTSKYDIEDGEAIDSRSLMIKTKKLIIDVIRNQPGNTLTEILETPATAQQEVDHATDMVSRAMIDSRTPEEMKHSQSMIEDAQLPLEQKKRKIQRNLRTLEQTGHVSSENKYQDILNEIAKDIRNQRIYRKLRKAELAKLQQTLNALNKKAAFYEEQINYYDTYIKTCLDNLKRKNTRRSIKLDGKGEPKGAKRAKPVKYTAAKLHEKGVLLDIDDLQTNQFKNVTFDIIATEDVGIFDVRSKFLGVEMEKVQLNIQDLLQMQYEGVAVMKMFDKVKVNVNLLIYLLNKKFYGK

SEQ ID NO: 3983 - protein, 246 aa, Homo sapiens
MTLIEGVGDEVTVLFSVLACLLVLALAWVSTHTAEGGDPLPQPSGTPTPSQPSAAMAATDSMRGEAPGAETPSLRHRGQAAQPEPSTGFTATPPAPDSPQEPLVLRLKFLNDSEQVARAWPHDTIGSLKRTQFPGREQQVRLIYQGQLLGDDTQTLGSLHLPPNCVLHCHVSTRVGPPNPPCPPGSEPGPSGLEIGSLLLPLLLLLLLLLWYCQIQYRPFFPLTATLGLAGFTLLLSLLAFAMYRP

SEQ ID NO: 3984 - protein, 777 aa, Homo sapiens
MGRGSGTFERLLDKATSQLLLETDWESILQICDLIRQGDTQAKYAVNSIKKKVNDKNPHVALYALEVMESVVKNCGQTVHDEVANKQTMEELKDLLKRQVEVNVRNKILYLIQAWAHAFRNEPKYKVVQDTYQIMKVEGHVFPEFKESDAMFAAERAPDWVDAEECHRCRVQFGVMTRKHHCRACGQIFCGKCSSKYSTIPKFGIEKEVRVCEPCYEQLNRKAEGKATSTTELPPEYLTSPLSQQSQLPPKRDETALQEEEELQLALALSQSEAEEKERLRQKSTYTSYPKAEPMPSASSAPPASSLYSSPVNSSAPLAEDIDPELARYLNRNYWEKKQEEARKSPTPSAPVPLTEPAAQPGEGHAAPTNVVENPLPETDSQPIPPSGGPFSEPQFHNGESEESHEQFLKALQNAVTTFVNRMKSNHMRGRSITNDSAVLSLFQSINGMHPQLLELLNQLDERRLYYEGLQDKLAQIRDARGALSALREEHREKLRRAAEEAERQRQIQLAQKLEIMRQKKQEYLEVQRQLAIQRLQEQEKERQMRLEQQKQTVQMRAQMPAFPLPYAQLQAMPAAGGVLYQPSGPASFPSTFSPAGSVEGSPMHGVYMSQPAPAAGPYPSMPSTAADPSMVSAYMYPAGATGAQAAPQAQAGPTASPAYSSYQPTPTAGYQNVASQAPQSLPAISQPPQSSTMGYMGSQSVSMGYQPYNMQNLMTTLPSQDASLPPQQPYIAGQQPMYQQMAPSGGPPQQQPPVAQQPQAQGPPAQGSEAQLISFD

SEQ ID NO: 3985 - protein, 1082 aa, Homo sapiens
MAARRITQETFDAVLQEKAKRYHMDASGEAVSETLQFKAQDLLRAVPRSRAEMYDDVHSDGRYSLSGSVAHSRDAGREGLRSDVFPGPSFRSSNPSISDDSYFRKECGRDLEFSHSDSRDQVIGHRKLGHFRSQDWKFALRGSWEQDFGHPVSQESSWSQEYSFGPSAVLGDFGSSRLIEKECLEKESRDYDVDHPGEADSVLRGSSQVQARGRALNIVDQEGSLLGKGETQGLLTAKGGVGKLVTLRNVSTKKIPTVNRITPKTQGTNQIQKNTPSPDVTLGTNPGTEDIQFPIQKIPLGLDLKNLRLPRRKMSFDIIDKSDVFSRFGIEIIKWAGFHTIKDDIKFSQLFQTLFELETETCAKMLASFKCSLKPEHRDFCFFTIKFLKHSALKTPRVDNEFLNMLLDKGAVKTKNCFFEIIKPFDKYIMRLQDRLLKSVTPLLMACNAYELSVKMKTLSNPLDLALALETTNSLCRKSLALLGQTFSLASSFRQEKILEAVGLQDIAPSPAAFPNFEDSTLFGREYIDHLKAWLVSSGCPLQVKKAEPEPMREEEKMIPPTKPEIQAKAPSSLSDAVPQRADHRVVGTIDQLVKRVIEGSLSPKERTLLKEDPAYWFLSDENSLEYKYYKLKLAEMQRMSENLRGADQKPTSADCAVRAMLYSRAVRNLKKKLLPWQRRGLLRAQGLRGWKARRATTGTQTLLSSGTRLKHHGRQAPGLSQAKPSLPDRNDAAKDCPPDPVGPSPQDPSLEASGPSPKPAGVDISEAPQTSSPCPSADIDMKTMETAEKLARFVAQVGPEIEQFSIENSTDNPDLWFLHDQNSSAFKFYRKKVFELCPSICFTSSPHNLHTGGGDTTGSQESPVDLMEGEAEFEDEPPPREAELESPEVMPEEEDEDDEDGGEEAPAPGGAGKSEGSTPADGLPGEAAEDDLAGAPALSQASSGTCFPRKRISSKSLKVGMIPAPKRVCLIQEPKVHEPVRIAYDRPRGRPMSKKKKPKDLDFAQQKLTDKNLGFQMLQKMGWKEGHGLGSLGKGIREPVSVGTPSEGEGLGADGQEHKEDTFDVFRQRMMQMYRHKRANK

SEQ ID NO: 3986 - protein, 1082 aa, Homo sapiens; identical to SEQ ID NO: 3985

SEQ ID NO: 3987 - protein, 1154 aa, Homo sapiens
MGLLLMILASAVLGSFLTLLAQFFLLYRRQPEPPADEAARAGEGFRYIKPVPGLLLREYLYGGGRDEEPSGAAPEGGATPTAAPETPAPPTRETCYFLNATILFLFRELRDTALTRRWVTKKIKVEFEELLQTKTAGRLLEGLSLRDVFLGETVPFIKTIRLVRPVVPSATGEPDGPEGEALPAACPEELAFEAEVEYNGGFHLAIDVDLVFGKSAYLFVKLSRVVGRLRLVFTRVPFTHWFFSFVEDPLIDFEVRSQFEGRPMPQLTSIIVNQLKKIIKRKHTLPNYKIRFKPFFPYQTLQGFEEDEEHIHIQQWALTEGRLKVTLLECSRLLIFGSYDREANVHCTLELSSSVWEEKQRSSIKTVELIKGNLQSVGLTLRLVQSTDGYAGHVIIETVAPNSPAAIADLQRGDRLIAIGGVKITSTLQVLKLIKQAGDRVLVYYERPVGQSNQGAVLQDNFGQLEENFLSSSCQSGYEEEAAGLTVDTESRELDSEFEDLASDVRAQNEFKDEAQSLSHSPKRVPTTLSIKPLGAISPVLNRKLAVGSHPLPPKIQSKDGNKPPPLKTSEITDPAQVSKPTQGSAFKPPVPPRPQAKVPLPSADAPNQAEPDVLVEKPEKVVPPPLVDKSAEKQAKNVDAIDDAAAPKQFLAKQEVAKDVTSETSCPTKDSSDDRQTWESSEILYRNKLGKWTRTRASCLFDIEACHRYLNIALWCRDPFKLGGLICLGHVSLKLEDVALGCLATSNTEYLSKLRLEAPSPKAIVTRTALRNLSMQKGFNDKFCYGDITIHFKYLKEGESDHHVVTNVEKEKEPHLVEEVSVLPKEEQFVGQMGLTENKHSFQDTQFQNPTWCDYCKKKVWTKAASQCMFCAYVCHKKCQEKCLAETSVCGATDRRIDRTLKNLRLEGQETLLGLPPRVDAEASKSVNKTTGLTRHIINTSSRLLNLRQVSKTRLSEPGTDLVEPSPKHTPNTSDNEGSDTEVCGPNSPSKRGNSTGIKLVRKEGGLDDSVFIAVKEIGRDLYRGLPTEERIQKLEFMLDKLQNEIDQELEHNNSLVREEKETTDTRKKSLLSAALAKSGERLQALTLLMIHYRAGIEDIETLESLSLDQHSKKISKYTDDTEEDLDNEISQLIDSQPFSSISDDLFGPSESV

SEQ ID NO: 3988 - protein, 1327 aa, Homo sapiens
MEAPLQTGMVLGVMIGAGVAVVVTAVLILLVVRRLRVPKTPAPDGPRYRFRKRDKVLFYGRKIMRKVSQSTSSLVDTSVSATSRPRMRKKLKMLNIAKKILRIQKETPTLQRKEPPPAVLEADLTEGDLANSHLPSEVLYMLKNVRVLGHFEKPLFLELCRHMVFQRLGQGDYVFRPGQPDASIYVVQDGLLELCLPGPDGKECVVKEVVPGDSVNSLLSILDVITGHQHPQRTVSARAARDSTVLRLPVEAFSAVFTKYPESLVRVVQIIMVRLQRVTFLALHNYLGLTNELFSHEIQPLRLFPSPGLPTRTSPVRGSKRMVSTSATDEPRETPGRPPDPTGAPLPGPTGDPVKPTSLETPSPPLLSRCVSMPGDISGLQGGPRSDFDMAYERGRISVSLQEEASGGSLAAPARTPTQEPREQPAGACEYSYCEDESATGGCPFGPYQGRQTSSIFEAAKQELAKLMRIEDPSLLNSRVLLHHAKAGTIIARQGDQDVSLHFVLWGCLHVYQRMIDKAEDVCLFVAQPGELVGQLAVLTGEPLIFTLRAQRDCTFLRISKSDFYEIMRAQPSVVLSAAHTVAARMSPFVRQMDFAIDWTAVEAGRALYRQGDRSDCTYIVLNGRLRSVIQRGSGKKELVGEYGRGDLIGVVEALTRQPRATTVHAVRDTELAKLPEGTLGHIKRRYPQVVTRLIHLLSQKILGNLQQLQGPFPAGSGLGVPPHSELTNPASNLATVAILPVCAEVPMVAFTLELQHALQAIGPTLLLNSDIIRARLGASALDSIQEFRLSGWLAQQEDAHRIVLYQTDASLTPWTVRCLRQADCILIVGLGDQEPTLGQLEQMLENTAVRALKQLVLLHREEGAGPTRTVEWLNMRSWCSGHLHLRCPRRLFSRRSPAKLHELYEKVFSRRADRHSDFSRLARVLTGNTIALVLGGGGARGCSHIGVLKALEEAGVPVDLVGGTSIGSFIGALYAEERSASRTRQRAREWAKSMTSVLEPVLDLTYPVTSMFTGSAFNRSIHRVFQDKQIEDLWLPYFNVTTDITASAMRVHKDGSLWRYVRASMTLSGYLPPLCDPKDGHLLMDGGYINNLPADIARSMGAKTVIAIDVGSQDETDLSTYGDSLSGWWLLWKRLNPWADKVKVPDMAEIQSRLAYVSCVRQLEVVKSSSYCEYLRPPIDCFKTMDFGKFDQIYDVGYQYGKAVFGGWSRGNVIEKMLTDRRSTDLNESRRADVLAFPSSGFTDLAEIVSRIEPPTSYVSDGCADGEESDCLTEYEEDAGPDCSRDEGGSPEGASPSTASEMEEEKSILRQRRCLPQEPPGSATDA

SEQ ID NO: 3989 - protein, 268 aa, Homo sapiens
MGLSPSAPAVAVQASNASASPPSGCPMHEGKMKGCPVNTGPSGPTCEKKTYSVPAHQERAYEYVECPIRGTAAENKENLDPSNLMPPPNQTPAPDQPFALSTVREESSIPRADSEKKWVYPSEQMFWNAMLKKGWKWKDEDISQKDMYNIIRIHNQNNEQAWKEILKWEALHAAECPCGPSLIRFGGKAKEYSPRARIRSWMGYELPFDRHDWIINRCGTEVRYVIDYYDGGEVNKDYQFTILDVRPALDSLSAVWDRMKVAWWRWTS

SEQ ID NO: 3990 - protein, 561 aa, Homo sapiens
MAAEEMHWPVPMKAIGAQNLLTMPGGVAKAGYLHKKGGTQLQLLKWPLRFVIIHKRCVYYFKSSTSASPQGAFSLSGYNRVMRAAEETTSNNVFPFKIIHISKKHRTWFFSASSEEERKSWMALLRREIGHFHEKKDLPLDTSDSSSDTDSFYGAVERPVDISLSPYPTDNEDYEHDDEDDSYLEPDSPEPGRLEDALMHPPAYPPPPVPTPRKPAFSDMPRAHSFTSKGPGPLLPPPPPKHGLPDVGLAAEDSKRDPLCPRRAEPCPRVPATPRRMSDPPLSTMPTAPGLRKPPCFRESASPSPEPWTPGHGACSTSSAAIMATATSRNCDKLKSFHLSPRGPPTSEPPPVPANKPKFLKIAEEDPPREAAMPGLFVPPVAPRPPALKLPVPEAMARPAVLPRPEKPQLPHLQRSPLDGQSFRSFSFEKPRQPSQADTGGDDSDEDYEKVPLPNSVFVNTTESCEVERLFKATSPRGEPQDGLYCIRNSSTKSGKVLVVWDETSNKVRNYRIFEKDSKFYLEGEVLFVSVGSMVEHYHTHVLPSHQSLLLRHPYGYTGPR

SEQ ID NO: 3991 - protein, 1025 aa, Homo sapiens
MAPVLSKDSADIESILALNPRTQTHATLCSTSAKKLDKKHWKRNPDKNCFNCEKLENNFDDIKHTTLGERGALREAMRCLKCADAPCQKSCPTNLDIKSFITSIANKNYYGAAKMIFSDNPLGLTCGMVCPTSDLCVGGCNLYATEEGPINIGGLQQFATEVFKAMSIPQIRNPSLPPPEKMSEAYSAKIALFGAGPASISCASFLARLGYSDITIFEKQEYVGGLSTSEIPQFRLPYDVVNFEIELMKDLGVKIICGKSLSVNEMTLSTLKEKGYKAAFIGIGLPEPNKDAIFQGLTQDQGFYTSKDFLPLVAKGSKAGMCACHSPLPSIRGVVIVLGAGDTAFDCATSALRCGARRVFIVFRKGFVNIRAVPEEMELAKEEKCEFLPFLSPRKVIVKGGRIVAMQFVRTEQDETGKWNEDEDQMVHLKADVVISAFGSVLSDPKVKEALSPIKFNRWGLPEVDPETMQTSEAWVFAGGDVVGLANTTVESVNDGKQASWYIHKYVQSQYGASVSAKPELPLFYTPIDLVDISVEMAGLKFINPFGLASATPATSTSMIRRAFEAGWGFALTKTFSLDKDIVTNVSPRIIRGTTSGPMYGPGQSSFLNIELISEKTAAYWCQSVTELKADFPDNIVIASIMCSYNKNDWTELAKKSEDSGADALELNLSCPHGMGERGMGLACGQDPELVRNICRWVRQAVQIPFFAKLTPNVTDIVSIARAAKEGGANGVTATNTVSGLMGLKSDGTPWPAVGIAKRTTYGGVSGTAIRPIALRAVTSIARALPGFPILATGGIDSAESGLQFLHSGASVLQVCSAIQNQDFTVIEDYCTGLKALLYLKSIEELQDWDGQSPATVSHQKGKPVPRIAELMDKKLPSFGPYLEQRKKIIAENKIRLKEQNVAFSPLKRSCFIPKRPIPTIKDVIGKALQYLGTFGELSNVEQVVAMIDEEMCINCGKCYMTCNDSGYQAIQFDPETHLPTITDTCTGCTLCLSVCPIVDCIKMVSRTTPYEPKRGVPLSVNPVC

SEQ ID NO: 3992 - protein, 840 aa, Homo sapiens
MSVVGIDLGFQSCYVAVARAGGIETIANEYSDRCTPACISFGPKNRSIGAAAKSQVISNAKNTVQGFKRFHGRAFSDPFVEAEKSNLAYDIVQLPTGLTGIKVTYMEEERNFTTEQVTAMLLSKLKETAESVLKKPVVDCVVSVPCFYTDAERRSVMDATQIAGLNCLRLMNETTAVALAYGIYKQDLPALEEKPRNVVFVDMGHSAYQVSVCAFNRGKLKVLATAFDTTLGGRKFDEVLVNHFCEEFGKKYKLDIKSKIRALLRLSQECEKLKKLMSANASDLPLSIECFMNDVDVSGTMNRGKFLEMCNDLLARVEPPLRSVLEQTKLKKEDIYAVEIVGGATRIPAVKEKISKFFGKELSTTLNADEAVTRGCALQCAILSPAFKVREFSITDVVPYPISLRWNSPAEEGSSDCEVFSKNHAAPFSKVLTFYRKEPFTLEAYYSSPQDLPYPDPAIAQFSVQKVTPQSDGSSSKVKVKVRVNVHGIFSVSSASLVEVHKSEENEEPMETDQNAKEEEKMQVDQEEPHVEEQQQQTPAENKAESEEMETSQAGSKDKKMDQPPQAKKAKVKTSTVDLPIENQLLWQIDREMLNLYIENEGKMIMQDKLEKERNDAKNAVEEYVYEMRDKLSGEYEKFVSEDDRNSFTLKLEDTENWLYEDGEDQPKQVYVDKLAELKNLGQPIKIRFQESEERPKLFEELGKQIQQYMKIISSFKNKEDQYDHLDAADMTKVEKSTNEAMEWMNNKLNLQNKQSLTMDPVVKSKEIEAKIKELTSTCSPIISKPKPKVEPPKEEQKNAEQNGPVDGQGDNPGPQAAEQGTDTAVPSDSDKKLPEMDID

SEQ ID NO: 3993 - protein, 148 aa, Homo sapiens
MSVVGIDLGFQSCYVAVARAGGIETIANEYSDRCTPACISFGPKNRSIGAAAKSQVISNAKNTVQGFKRFHGRAFSDPFVEAEKSNLAYDIVQLPTGLTGIKVTYMEEEQNGPVDGQGDNPGPQAAEQGTDTAVPSDSDKKLPEMDID

SEQ ID NO: 3994 - protein, 331 aa, Homo sapiens
MARGGRGRRLGLALGLLLALVLAPRVLRAKPTVRKERVVRPDSELGERPPEDNQSFQYDHEAFLGKEDSKTFDQLTPDESKERLGKIVDRIDNDGDGFVTTEELKTWIKRVQKRYIFDNVAKVWKDYDRDKDDKISWEEYKQATYGYYLGNPAEFHDSSDHHTFKKMLPRDERRFKAADLNGDLTATREEFTAFLHPEEFEHMKEIVVLETLEDIDKNGDGFVDQDEYIADMFSHEENGPEPDWVLSEREQFNEFRDLNKDGKLDKDEIRHWILPQDYDHAQAEARHLVYESDKNKDEKLTKEEILENWNMFVGSQATNYGEDLTKNHDEL

SEQ ID NO: 3995 - protein, 562 aa, Homo sapiens
MAASAKRKQEEKHLKMLRDMTGLPHNRKCFDCDQRGPTYVNMTVGSFVCTSCSGSLRGLNPPHRVKSISMTTFTQQEIEFLQKHGNEVCKQIWLGLFDDRSSAIPDFRDPQKVKEFLQEKYEKKRWYVPPEQAKVVASVHASISGSSASSTSSTPEVKPLKSLLGDSAPTLHLNKGTPSQSPVVGRSQGQQQEKKQFDLLSDLGSDIFAAPAPQSTATANFANFAHFNSHAAQNSANADFANFDAFGQSSGSSNFGGFPTASHSPFQPQTTGGSAASVNANFAHFDNFPKSSSADFGTFNTSQSHQTASAVSKVSTNKAGLQTADKYAALANLDNIFSAGQGGDQGSGFGTTGKAPVGSVVSVPSQSSASSDKYAALAELDSVFSSAATSSNAYTSTSNASSNVFGTVPVVASAQTQPASSSVPAPFGATPSTNPFVAAAGPSVASSTNPFQTNARGATAATFGTASMSMPTGFGTPAPYSLPTSFSGSFQQPAFPAQAAFPQQTAFSQQPNGAGFAAFGQTKPVVTPFGQVAAAGVSSNPFMTGAPTGQFPTGSSSTNPFL

SEQ ID NO: 3996 - protein, 58 aa, Homo sapiens
MLQSIIKNIWIPMKPYYTKVYQEIWIGMGLMGFIVYKIRAADKRSKALKASAPAPGHH

SEQ ID NO: 3997 - protein, 606 aa, Homo sapiens
MSHTASSCQELVENCAVHVAGMAQEDSRRGQVPSSFYHGANQELDLSTKVYKRESGSPYSVLVDTKMSKPHLHETEEQPYFRETRAVSDVHAVKEDRENSDDTEEEEEEVSYKREQIIVEVNLNNQTLNVSKGEKGVSSQSKETPVLKTSSEEEEEESEEEATDDSNDYGENEKQKKKEKIVEKVSVTQRRTRRAASVAAATTSPTPRTTRGRRKSVEPPKRKKRATKEPKAPVQKAKCEEKETLTCEKCPRVFNTRWYLEKHMNVTHRRMQICDKCGKKFVLESELSLHQQTDCEKNIQCVSCNKSFKKLWSLHEHIKIVHGYAEKKFSCEICEKKFYTMAHVRKHMVAHTKDMPFTCETCGKSFKRSMSLKVHSLQHSGEKPFRCENCDERFQYKYQLRSHMSIHIGHKQFMCQWCGKDFNMKQYFDEHMKTHTGEKPFICEICGKSFTSRPNMKRHRRTHTGEKPYPCDVCGQRFRFSNMLKAHKEKCFRVTSPVNVPPAVQIPLTTSPATPVPSVVNTATTPTPPINMNPVSTLPPRPIPHPFSHLHIHPHPHHPHHLPIPPVPHLPPPPALFKSEPLNHRGQSEDNFLRHLAEKNSSAQHH

SEQ ID NO: 3998 - protein, 656 aa, Homo sapiens
MEGDGSDPEPPDAGEDSKSENGENAPIYCICRKPDINCFMIGCDNCNEWFHGDCIRITEKMAKAIREWYCRECREKDPKLEIRYRHKKSRERDGNERDSSEPRDEGGGRKRPVPDPNLQRRAGSGTGVGAMLARGSASPHKSSPQPLVATPSQHHQQQQQQIKRSARMCGECEACRRTEDCGHCDFCRDMKKFGGPNKIRQKCRLRQCQLRARESYKYFPSSLSPVTPSESLPRPRRPLPTQQQPQPSQKLGRIREDEGAVASSTVKEPPEATATPEPLSDEDLPLDPDLYQDFCAGAFDDNGLPWMSDTEESPFLDPALRKRAVKVKHVKRREKKSEKKKEERYKRHRQKQKHKDKWKHPERADAKDPASLPQCLGPGCVRPAQPSSKYCSDDCGMKLAANRIYEILPQRIQQWQQSPCIAEEHGKKLLERIRREQQSARTRLQEMERRFHELEAIILRAKQQAVREDEESNEGDSDDTDLQIFCVSCGHPINPRVALRHMERCYAKYESQTSFGSMYPTRIEGATRLFCDVYNPQSKTYCKRLQVLCPEHSRDPKVPADEVCGCPLVRDVFELTGDFCRLPKRQCNRHYCWEKLRRAEVDLERVRVWYKLDELFEQERNVRTAMTNRAGLLALMLHQTIQHDPLTTDLRSSADR

SEQ ID NO: 3999 - protein, 723 aa, Homo sapiens
MAAAATMAAAARELVLRAGTSDMEEEEGPLAGGPGLQEPLQLGELDITSDEFILDEVDVHIQANLEDELVKEALKTGVDLRHYSKQVELELQQIEQKSIRDYIQESENIASLHNQITACDAVLERMEQMLGAFQSDLSSISSEIRTLQEQSGAMNIRLRNRQAVRGKLGELVDGLVVPSALVTAILEAPVTEPRFLEQLQELDAKAAAVREQEARGTAACADVRGVLDRLRVKAVTKIREFILQKIYSFRKPMTNYQIPQTALLKYRFFYQFLLGNERATAKEIRDEYVETLSKIYLSYYRSYLGRLMKVQYEEVAEKDDLMGVEDTAKKGFFSKPSLRSRNTIFTLGTRGSVISPTELEAPILVPHTAQRGEQRYPFEALFRSQHYALLDNSCREYLFICEFFVVSGPAAHDLFHAVMGRTLSMTLKHLDSYLADCYDAIAVFLCIHIVLRFRNIAAKRDVPALDRYWEQVLALLWPRFELILEMNVQSVRSTDPQRLGGLDTRPHYITRRYAEFSSALVSINQTIPNERTMQLLGQLQVEVENFVLRVAAEFSSRKEQLVFLINNYDMMLGVLMERAADDSKEVESFQQLLNARTQEFIEELLSPPFGGLVAFVKEAEALIERGQAERLRGEEARVTQLIRGFGSSWKSSVESLSQDVMRSFTNFRNGTSIIQGALTQLIQLYHRFHRVLSQPQLRALPARAELINIHHLMVELKKHKPNF

SEQ ID NO: 4000 - protein, 457 aa, Homo sapiens
MTTDEGAKNNEESPTATVAEQGEDITSKKDRGVLKIVKRVGNGEETPMIGDKVYVHYKGKLSNGKKFDSSHDRNEPFVFSLGKGQVIKAWDIGVATMKKGEICHLLCKPEYAYGSAGSLPKIPSNATLFFEIELLDFKGEDLFEDGGIIRRTKRKGEGYSNPNEGATVEIHLEGRCGGRMFDCRDVAFTVGEGEDHDIPIGIDKALEKMQREEQCILYLGPRYGFGEAGKPKFGIEPNAELIYEVTLKSFEKAKESWEMDTKEKLEQAAIVKEKGTVYFKGGKYMQAVIQYGKIVSWLEMEYGLSEKESKASESFLLAAFLNLAMCYLKLREYTKAVECCDKALGLDSANEKGLYRRGEAQLLMNEFESAKGDFEKVLEVNPQNKAARLQISMCQKKAKEHNERDRRIYANMFKKFAEQDAKEEANKAMGKKTSEGVTNEKGTDSQAMEEEKPEGHV

SEQ ID NO: 4001 - protein, 640 aa, Homo sapiens
MPPRVTFQPCGWQWNQDTPLNSEYDFALVNIGRLEAVSGLSRVQLLRPGSLHKFIPEEILIHGRDFRLLRVGFEAGGLEPQAFQVTMAIVQARAQSNQAQQYSGITLSKAGQGSGSRKPPIPLMETAEDWETERKKQAARGWRVSTVNERFDVATSLPRYFWVPNRILDSEVRRAFGHFHQGRGPRLSWHHPGGSDLLRCGGFYTASDPNKEDIRAVELMLQAGHSDVVLVDTMDELPSLADVQLAHLRLRALCLPDSSVAEDKWLSALEGTRWLDYVRACLRKASDISVLVTSRVRSVILQERGDRDLNGLLSSLVQLLSAPEARTLFGFQSLVQREWVAAGHPFLTRLGGTGASEEAPVFLLFLDCVWQLLQQFPADFEFSEFFLLALHDSVRVPDTLTFLRNTPWERGKQSGQLNSYTQVYTPGYSQPPAGNSFNLQLSVWDWDLRYSNAQILQFQNPGYDPEHCPDSWLPRPQPSFMVPGPPSSVWLFSRGALTPLNQLCPWRDSPSLLAVSSRWLPRPAISSESLADQEWGLPSHWGACPLPPGLLLPGYLGPQIRLWRRCYLRGRPEVQMGLSAPTISGLQDELSHLQELLRKWTPRISPEDHSKKRDPHTILNPTEIAGILKGQSHPFWITRC

SEQ ID NO: 4002 - protein, 325 aa, Homo sapiens
MATPLPPPSPRHLRLLRLLLSGLVLGAALRGAAAGHPDVAACPGSLDCALKRRARCPPGAHACGPCLQPFQEDQQGLCVPRMRRPPGGGRPQPRLEDEIDFLAQELARKESGHSTPPLPKDRQRLPEPATLGFSARGQGLELGLPSTPGTPTPTPHTSMGSPVSSDPVHMSPLEPRGGQGDGLALVLILAFCVAGAAALSVASLCWCRLHREIRLTQKADYATAKAPGSPAAPRISPGDQRLAQSAEMYHYQHQRQQMLCLERHKEPPKELDTASSDEENEDGDFTVYECPGLAPTGEMEVRNPLFDHAALSAPLPAPSSPPALP

SEQ ID NO: 4003 - protein, 364 aa, Homo sapiens
MPGCPCPGCGMAGPRLLFLTALALELLGRAGGSQPALRSRGTATACRLDNKESESWGALLSGERLDTWICSLLGSLMVGLSGVFPLLVIPLEMGTMLRSEAGAWRLKQLLSFALGGLLGNVFLHLLPEAWAYTCSASPGGEGQSLQQQQQLGLWVIAGILTFLALEKMFLDSKEEGTSQAPNKDPTAAAAALNGGHCLAQPAAEPGLGAVVRSIKVSGYLNLLANTIDNFTHGLAVAASFLVSKKIGLLTTMAILLHEIPHEVGDFAILLRAGFDRWSAAKLQLSTALGGLLGAGFAICTQSPKGVEETAAWVLPFTSGGFLYIALVNVLPDLLEEEDPWRSLQQLLLLCAGIVVMVLFSLFVD

SEQ ID NO: 4004 - protein, 346 aa, Homo sapiens
MCEGPSRISGPIPPDPTLCPDNYRRPTSAQGRLEGNALKLDLLTSDRALDTTAPRGPCIGPGAGEILERGQRGVGDVLLQLEGISLGPGASLKRKDPKDHEKENLRRIREIQKRFREQERSREQGQPRPLKALWRSPKYDKVESRVKAQLQEPGPASGTESAHFLRAHSRCGPGLPPPHVSSPQPTPPGPEAKEPGLGVDFIRHNARAAKRAPRRHSCSLQVLAQVLEQQRQAQEHYNATQKGHVPHYLLERRDLWRREAEARKQSQPDPAMPPGHTRMPENQRLETLTKLLQSQSQLLRELVLLPAGADSLRAQSHRAELDRKLVQVEEAIKIFSRPKVFVKMDD

SEQ ID NO: 4005 - protein, 350 aa, Homo sapiens
MTDQAFVTLTTNDAYAKGALVLGSSLKQHRTTRRLVVLATPQVSDSMRKVLETVFDEVIMVDVLDSGDSAHLTLMKRPELGVTLTKLHCWSLTQYSKCVFMDADTLVLANIDDLFDREELSAAPDPGWPDCFNSGVFVYQPSVETYNQLLHLASEQGSFDGGDQGILNTFFSSWATTDIRKHLPFIYNLSSISIYSYLPAFKVFGASAKVVHFLGRVKPWNYTYDPKTKSVKSEAHDPNMTHPEFLILWWNIFTTNVLPLLQQFGLVKDTCSYVNVLSDLVYTLAFSCGFCRKEDVSGAISHLSLGEIPAMAQPFVSSEERKERWEQGQADYMGADSFDNIKRKLDTYLQ

SEQ ID NO: 4006 - protein, 400 aa, Homo sapiens
MIRNWLTIFILFPLKLVEKCESSVSLTVPPVVKLENGSSTNVSLTLRPPLNATLVITFEITFRSKNITILELPDEVVVPPGVTNSSFQVTSQNVGQLTVYLHGNHSNQTGPRIRFLVIRSSAISIINQVIGWIYFVAWSISFYPQVIMNWRRKSVIGLSFDFVALNLTGFVAYSVFNIGLLWVPYIKEQFLLKYPNGVNPVNSNDVFFSLHAVVLTLIIIVQCCLYERGGQRVSWPAIGFLVLAWLFAFVTMIVAAVGVITWLQFLFCFSYIKLAVTLVKYFPQAYMNFYYKSTEGWSIGNVLLDFTGGSFSLLQMFLQSYNNDQWTLIFGDPTKFGLGVFSIVFDVVFFIQHFCLYRKRPGLQAARTGSGSRLRQDWAPSLQPKALPQTTSVSASSLKG

SEQ ID NO: 4007 - protein, 367 aa, Homo sapiens
MIRNWLTIFILFPLKLVEKCESSVSLTVPPVVKLENGSSTNVSLTLRPPLNATLVITFEITFRSKNITILELPDEVVVPPGVTNSSFQVTSQNVGQLTVYLHGNHSNQTGPRIRFLVIRSSAISIINQVIGWIYFVAWSISFYPQVIMNWRRKSVIGLSFDFVALNLTGFVAYSVFNIGLLWVPYIKEQFLLKYPNGVNPVNSNDVFFSLHAVVLTLIIIVQCCLYERGGQRVSWPAIGFLVLAWLFAFVTMIVAAVGVITWLQFLFCFSYIKLAVTLVKYFPQAYMNFYYKSTEGWSIGNVLLDFTGGSFSLLQMFLQSYNNDQWTLIFGDPTKFGLGVFSIVFDVVFFIQHFCLYRKRPGYDQLN

SEQ ID NO: 4008 - protein, 782 aa, Homo sapiens
MAAAAAAGPSPGSGPGDSPEGPEGEAPERRRKAHGMLKLYYGLSEGEAAGRPAGPDPLDPTDLNGAHFDPEVYLDKLRRECPLAQLMDSETDMVRQIRALDSDMQTLVYENYNKFISATDTIRKMKNDFRKMEDEMDRLATNMAVITDFSARISATLQDRHERITKLAGVHALLRKLQFLFELPSRLTKCVELGAYGQAVRYQGRAQAVLQQYQHLPSFRAIQDDCQVITARLAQQLRQRFREGGSGAPEQAECVELLLALGEPAEELCEEFLAHARGRLEKELRNLEAELGPSPPAPDVLEFTDHGGSGFVGGLCQVAAAYQELFAAQGPAGAEKLAAFARQLGSRYFALVERRLAQEQGGGDNSLLVRALDRFHRRLRAPGALLAAAGLADAATEIVERVARERLGHHLQGLRAAFLGCLTDVRQALAAPRVAGKEGPGLAELLANVASSILSHIKASLAAVHLFTAKEVSFSNKPYFRGEFCSQGVREGLIVGFVHSMCQTAQSFCDSPGEKGGATPPALLLLLSRLCLDYETATISYILTLTDEQFLVQDQFPVTPVSTLCAEARETARRLLTHYVKVQGLVISQMLRKSVETRDWLSTLEPRNVRAVMKRVVEDTTAIDVQVGLLYEEGVRKAQSSDSSKRTFSVYSSSRQQGRYAPSYTPSAPMDTNLLSNIQKLFSERIDVFSPVEFNKVSVLTGIIKISLKTLLECVRLRTFGRFGLQQVQVDCHFLQLYLWRFVADEELVHLLLDEVVASAALRCPDPVPMEPSVVEVICERG

SEQ ID NO: 4009 - protein, 374 aa, Homo sapiens
MEPGGEPTGAKESSTLMESLAAVKAAFLAQAPSGSRSAEVQAAQSTEPAAEAGAPEGEGHRGGPPRALGSLGLCENQEARERPGGSPRGPVTSEKTGGQSGLESDVPPNAGPGAEGGGSWKGRPFPCGACGRSFKCSSDAAKHRSIHSGEKPYECSDCGKAFIHSSHVVRHQRAHSGERPYACAECGKAFGQSFNLLRHQRVHTGEKPYACADCGKAFGQRSDAAKHRRTHTGERLYACGECGKRFLHSSNVVRHRRTHHGENPYECRECGQAFSQSSNLLQHQRVHTGERPFACQDCGRAFSRSSFLREHCRIHTGEKPHQCGHCGRAFRALSGFFRHQRLHTGEKPFRCTECGRAFRLSFHLIQHRRVHGAE

SEQ ID NO: 4010 - protein, 951 aa, Homo sapiens
MYGASGGRAKPERKSGAKEEAGPGGAGGGGSRVELLVFGYACKLFRDDERALAQEQGQHLIPWMGDHKILIDRYDGRGHLHDLSEYDAEYSTWNRDYQLSEEEARIEALCDEERYLALHTDLLEEEARQEEEYKRLSEALAEDGSYNAVGFTYGSDYYDPSEPTEEEEPSKQREKNEAENLEENEEPFVAPLGLSVPSDVELPPTAKMHAIIERTASFVCRQGAQFEIMLKAKQARNSQFDFLRFDHYLNPYYKFIQKAMKEGRYTVLAENKSDEKKKSGVSSDNEDDDDEEDGNYLHPSLFASKKCNRLEELMKPLKVVDPDHPLAALVRKAQADSSTPTPHNADGAPVQPSQVEYTADSTVAAMYYSYYMLPDGTYCLAPPPPGIDVTTYYSTLPAGVTVSNSPGVTTTAPPPPGTTPLPPPTTAETSSGATSTTTTTSALAPVAAIIPPPPDVQPVIDKLAEYVARNGLKFETSVRAKNDQRFEFLQPWHQYNAYYEFKKQFFLQKEGGDSMQAVSAPEEAPTDSAPEKPSDAGEDGAPEDAAEVGARAGSGGKKEASSSKTVPDGKLVKASFAPISFAIKAKENDLLPLEKNRVKLDDDSDDDEESKEGQESSSSAANTNPAVAPPCVVVEEKKPQLTQEELEAKQAKQKLEDRLAAAAREKLAQASKESKEKQLQAERKRKAALFLQTLKNPLPEAEAGKIEESPFSVEESSTTPCPLLTGGRPLPTLEVKPPDRPSSKSKDPPREEEKEKKKKKHKKRSRTRSRSPKYHSSSKSRSRSHSKAKHSLPSAYRTVRRSRSRSRSPRRRAHSPERRREERSVPTAYRVSRSPGASRKRTRSRSPHEKKKKRRSRSRTKSKARSQSVSPSKQAAPRPAAPAAHSAHSASVSPVESRGSSQERSRGVSQEKEAQISSAIVSSVQSKITQDLMAKVRAMLAASKNLQTSAS

SEQ ID NO: 4011 - protein, 121 aa, Homo sapiens
MYGASGGRAKPERKSGAKEEAGPGGAGGGGSRVELLVFGYACKLFRDDERALAQEQGQHLIPWMGDHKILIDRYDGRGHLHDLSEYDAEYSTWNRDYQLSEEEARIEALCDEERGRIQAIE

SEQ ID NO: 4012 - protein, 106 aa, Homo sapiens
MAQEFVNCKIQPGKVVVFIKPTCPYCRRAQEILSQLPIKQGLLEFVDITATNHTNEIQDYLQQLTGARTVPRVFIGKDCIGGCSDLVSLQQSGELLTRLKQIGALQ

SEQ ID NO: 4013 - protein, 1242 aa, Homo sapiens
MKNLLTEKCISSHNFHQKVIKQRMEKKVDSRYFKDGAVKKPYSAKTLSNKKSSASFGIRRELPSTSHLVQYRGTHTCTRQGRLRELRIRCVARKFLYLWIRMTFGRVFPSKARFYYEQRLLRKVFEEWKEEWWVFQHEWKLCVRADCHYRYYLYNLMFQTWKTYVRQQQEMRNKYIRAEVHDAKQKMRQAWKSWLIYVVVRRTKLQMQTTALEFRQRIILRVWWSTWRQRLGQVRVSRALHASALKHRALSLQVQAWSQWREQLLYVQKEKQKVVSAVKHHQHWQKRRFLKAWLEYLQVRRVKRQQNEMAERFHHVTVLQIYFCDWQQAWERRESLYAHHAQVEKLARKMALRRAFTHWKHYMLLCAEEAAQFEMAEEHHRHSQLYFCFRALKDNVTHAHLQQIRRNLAHQQHGVTLLHRFWNLWRSQIEQKKERELLPLLHAAWDHYRIALLCKCIELWLQYTQKRRYKQLLQARADGHFQQRALPAAFHTWNRLWRWRHQENVLSARATRFHRETLEKQVFSLWRQKMFQHRENRLAERMAILHAERQLLYRSWFMWHQQAAARHQEQEWQTVACAHHRHGRLKKAFCLWRESAQGLRTERTGRVRAAEFHMAQLLRWAWSQWRECLALRGAERQKLMRADLHHQHSVLHRALQAWVTYQGRVRSILREVAARESQHNRQLLRGALRRWKENTMARVDEAKKTFQASTHYRRTICSKVLVQWREAVSVQMYYRQQEDCAIWEAQKVLDRGCLRTWFQRWWDCSRRSAQQRLQLERAVQHHHRQLLLEGLARWKTHHLQCVRKRLLHRQSTQLLAQRLSRTCFRQWRQQLAARRQEQRATVRALWFWAFSLQAKVWATWLAFVLERRRKKARLQWALQAYQGQLLQEGATRLLRFAASMKASRQQLQAQQQVQAAHSLHRAVRRCATLWKQKVLGRGGKPQPLAAIAPSRKVTFEGPLLNRIAAGAGDGTLETKRPQASRPLGALGRLAAEEPHALELNTAHSARKQPRRPHFLLEPAQSQRPQKPQEHGLGMAQPAAPSLTRPFLAEAPTALVPHSPLPGALSSAPGPKQPPTASTGPELLLLPLSSFMPCGAAAPARVSAQRATPRDKPPVPSSLASVPDPHLLLPGDFSATRAGPGLSTAGSLDLEAELEEIQQQLLHYQTTKQNLWSCRRQASSLRRWLELNREEPGPEDQEVEQQVQKELEQVEMQIQLLAEELQAQRQPIGACVARIQALRQALC

SEQ ID NO: 4014 - protein, 1211 aa, Homo sapiens
MKNLLTEKCISSHNFHQKVIKQRMEKKVDSRYFKDGAVKKPYSAKTLSNKKSSASFGIRRELPSTSHLVQYRGTHTCTRQGRLRELRIRCVARKFLYLWIRMTFGRVFPSKARFYYEQRLLRKVFEEWKEEWWVFQHEWKLCVRADCHYRYYLYNLMFQTWKTYVRQQQEMRNKYIRAEVHDAKQKMRQAWKSWLIYVVVRRTKLQMQTTALEFRQRIILRVWWSTWRQRLGQVRVSRALHASALKHRALSLQVQAWSQWREQLLYVQKEKQKVVSAVKHHQHWQKRRFLKAWLEYLQVRRVKRQQNEMAERFHHVTVLQIYFCDWQQAWERRESLYAHHAQVEKLARKMALRRAFTHWKHYMLLCAEEAAQFEMAEEHHRHSQLLLHRFWNLWRSQIEQKKERELLPLLHAAWDHYRIALLCKCIELWLQYTQKRRYKQLLQARADGHFQQRALPAAFHTWNRLWRWRHQENVLSARATRFHRETLEKQVFSLWRQKMFQHRENRLAERMAILHAERQLLYRSWFMWHQQAAARHQEQEWQTVACAHHRHGRLKKAFCLWRESAQGLRTERTGRVRAAEFHMAQLLRWAWSQWRECLALRGAERQKLMRADLHHQHSVLHRALQAWVTYQGRVRSILREVAARESQHNRQLLRGALRRWKENTMARVDEAKKTFQASTHYRRTICSKVLVQWREAVSVQMYYRQQEDCAIWEAQKVLDRGCLRTWFQRWWDCSRRSAQQRLQLERAVQHHHRQLLLEGLARWKTHHLQCVRKRLLHRQSTQLLAQRLSRTCFRQWRQQLAARRQEQRATVRALWFWAFSLQAKVWATWLAFVLERRRKKARLQWALQAYQGQLLQEGATRLLRFAASMKASRQQLQAQQQVQAAHSLHRAVRRCATLWKQKVLGRGGKPQPLAAIAPSRKVTFEGPLLNRIAAGAGDGTLETKRPQASRPLGALGRLAAEEPHALELNTAHSARKQPRRPHFLLEPAQSQRPQKPQEHGLGMAQPAAPSLTRPFLAEAPTALVPHSPLPGALSSAPGPKQPPTASTGPELLLLPLSSFMPCGAAAPARVSAQRATPRDKPPVPSSLASVPDPHLLLPGDFSATRAGPGLSTAGSLDLEAELEEIQQQLLHYQTTKQNLWSCRRQASSLRRWLELNREEPGPEDQEVEQQVQKELEQVEMQIQLLAEELQAQRQPIGACVARIQALRQALC

SEQ ID NO: 4015 - protein, 589 aa, Homo sapiens
MEGFGGVGGRGTRGFAAKGVWRGRAEEGPVLGAAERGFMVSTGSRRRVFEGPGGGGLRWTPGKGTGRQRGAWGPRAEDGVRRRTLGMPRGSRRDVRAPCGPAGSWGARGGRRRDGPSRRRRGSATAAARHHVPPAPGGPFGPRAPAGSTRVPARAGGAVEPTGAAAVARLARPAGGALPTAGAQGAGPARGRSGEGSEWARRGKGRPGPYQSPLGPAVAEGQELKDKSRLRYPINGFQALVLTALLVGLGMSAGLPLGALPEMLLPLAFVATLTAFIFSLFLYMKAQVAPVSALAPGGNSGNPIYDFFLGRELNPRICFFDFKYFCELRPGLIGWVLINLALLMKEAELRGSPSLAMWLVNGFQLLYVGDALWHEEAVLTTMDITHDGFGFMLAFGDMAWVPFTYSLQAQFLLHHPQPLGLPMASVICLINATGYYIFRGANSQKNTFRKNPSDPRVAGLETISTATGRKLLVSGWWGMVRHPNYLGDLIMALAWSLPCGVSHLLPYFYLLYFTALLVHREARDERSACRSTAWPGRSTAGVCLTASCPTSTEAAPPPQVGHVPTHPPAHPGPGASTHLGLKGLHPTQP

SEQ ID NO: 4016 - protein, 225 aa, Homo sapiens
MTSQPVPNETIIVLPSNVINFSQAEKPEPTNQGQDSLKKHLHAEIKVIGTIQILCGMMVLSLGIILASASFSPNFTQVTSTLLNSAYPFIGPFFFIISGSLSIATEKRLTKLLVHSSLVGSILSALSALVGFIILSVKQATLNPASLQCELDKNNIPTRSYVSYFYHDSLYTTDCYTAKASLAGTLSLMLICTLLEFCLAVLTAVLRWKQAYSDFPGVSVLAGFT

SEQ ID NO: 4017 - protein, 178 aa, Homo sapiens
MTSQPVPNETIIVLPSNVINFSQAEKPEPTNQGQDSLKKHLHAEIKVIGTIQILCGMMVLSLGIILASASFSPNFTQVTSTLLNSAYPFIGPFFFIISGSLSIATEKRLTKLLVHSSLVGSILSALSALVGFIILSVKQATLNPASLQWNSLSDADLHSAGILPSCAHCCAAVETGLL

SEQ ID NO: 4018 - protein, 248 aa, Homo sapiens
MTSQPVPNETIIVLPSNVINFSQAEKPEPTNQGQDSLKKHLHAEIKVIGTIQILCGMMVLSLGIILASASFSPNFTQVTSTLLNSAYPFIGPFFFIISGSLSIATEKRLTKLLVHSSLVGSILSALSALVGFIILSVKQATLNPASLQCELDKNNIPTRSYVSYFYHDSLYTTDCYTAKASLAGTLSLMLICTLLEFCLAVLTAVLRWKQAYSDFPGSVLFLPHSYIGNSGMSSKMTHDCGYEELLTS

SEQ ID NO: 4019 - protein, 634 aa, Homo sapiens
MAEEQEFTQLCKLPAQPSHPHCVNNTYRSAQHSQALLRGLLALRDSGILFDVVLVVEGRHIEAHRILLAASCDYFRGMFAGGLKEMEQEEVLIHGVSYNAMCQILHFIYTSELELSLSNVQETLVAACQLQIPEIIHFCCDFLMSWVDEENILDVYRLAELFDLSRLTEQLDTYILKNFVAFSRTDKYRQLPLEKVYSLLSSNRLEVSCETEVYEGALLYHYSLEQVQADQISLHEPPKLLETVRFPLMEAEVLQRLHDKLDPSPLRDTVASALMYHRNESLQPSLQSPQTELRSDFQCVVGFGGIHSTPSTVLSDQAKYLNPLLGEWKHFTASLAPRMSNQGIAVLNNFVYLIGGDNNVQGFRAESRCWRYDPRHNRWFQIQSLQQEHADLSVCVVGRYIYAVAGRDYHNDLNAVERYDPATNSWAYVAPLKREVYAHAGATLEGKMYITCGRRGEDYLKETHCYDPGSNTWHTLADGPVRRAWHGMATLLNKLYVIGGSNNDAGYRRDVHQVACYSCTSGQWSSVCPLPAGHGEPGIAVLDNRIYVLGGRSHNRGSRTGYVHIYDVEKDCWEEGPQLDNSISGLAACVLTLPRSLLLEPPRGTPDRSQADPDFASEVMSVSDWEEFDNSSED

SEQ ID NO: 4020 - protein, 296 aa, Homo sapiens
MTKTALLKLFVAIVITFILILPEYFKTPKERTLELSCLEVCLQSNFTYSLSSLNFSFVTFLQPVRETQIIMRIFLNPSNFRNFTRTCQDITGEFKMCSSCLVCESKGNMDFISQEQTSKVLIRRGSMEVKANDFHSPCQHFNFSVAPLVDHLEEYNTTCHLKNHTGRSTIMEDEPSKEKSINYTCRIMEYPNDCIHISLHLEMDIKNITCSMKITWYILVLLVFIFLIILTIRKILEGQRRVQKWQSHRDKPTSVLLRGSDSEKLRALNVQVLSAETTQRLPLDQVQEVLPPIPEL

SEQ ID NO: 4021 - protein, 745 aa, Homo sapiens
MPFPVTTQGSQQTQPPQKHYGITSPISLAAPKETDCVLTQKLIETLKPFGVFEEEEELQRRILILGKLNNLVKEWIREISESKNLPQSVIENVGGKIFTFGSYRLGVHTKGADIDALCVAPRHVDRSDFFTSFYDKLKLQEEVKDLRAVEEAFVPVIKLCFDGIEIDILFARLALQTIPEDLDLRDDSLLKNLDIRCIRSLNGCRVTDEILHLVPNIDNFRLTLRAIKLWAKRHNIYSNILGFLGGVSWAMLVARTCQLYPNAIASTLVHKFFLVFSKWEWPNPVLLKQPEECNLNLPVWDPRVNPSDRYHLMPIITPAYPQQNSTYNVSVSTRMVMVEEFKQGLAITDEILLSKAEWSKLFEAPNFFQKYKHYIVLLASAPTEKQRLEWVGLVESKIRILVGSLEKNEFITLAHVNPQSFPAPKENPDKEEFRTMWVIGLVFKKTENSENLSVDLTYDIQSFTDTVYRQAINSKMFEVDMKIAAMHVKRKQLHQLLPNHVLQKKKKHSTEGVKLTALNDSSLDLSMDSDNSMSVPSPTSATKTSPLNSSGSSQGRNSPAPAVTAASVTNIQATEVSVPQVNSSESSGGTSSESIPQTATQPAISPPPKPTVSRVVSSTRLVNPPPRSSGNAATSGNAATKIPTPIVGVKRTSSPHKEESPKKTKTEEDETSEDANCLALSGHDKTEAKEQLDTETSTTQSETIQTAASLLASQKTSSTDLSDIPALPANPIPVIKNSIKLRLNR

SEQ ID NO: 4022 - protein, 177 aa, Homo sapiens
MSSNECFKCGRSGHWARECPTGGGRGRGMRSRGRGGFTSDRGFQFVSSSLPDICYRCGESGHLAKDCDLQEDACYNCGRGGHIAKDCKEPKREREQCCYNCGKPGHLARDCDHADEQKCYSCGEFGHIQKDCTKVKCYRCGETGHVAINCSKTSEVNCYRCGESGHLARECTIEATA

SEQ ID NO: 4023 - protein, 375 aa, Homo sapiens
MAVTEASLLRQCPLLLPQNRSKTVYEGFISAQGRDFHLRIVLPEDLQLKNARLLCSWQLRTILSGYHRIVQQRMQHSPDLMSFMMELKMLLEVALKNRQELYALPPPPQFYSSLIEEIGTLGWDKLVYADTCFSTIKLKAEDASGREHLITLKLKAKYPAESPDYFVDFPVPFCASWTPQSSLISIYSQFLAAIESLKAFWDVMDEIDEKTWVLEPEKPPRSATARRIALGNNVSINIEVDPRHPTMLPECFFLGADHVVKPLGIKLSRNIHLWDPENSVLQNLKDVLEIDFPARAILEKSDFTMDCGICYAYQLDGTIPDQVCDNSQCGQPFHQICLYEWLRGLLTSRQSFNIIFGECPYCSKPITLKMSGRKH

SEQ ID NO: 4024 - protein, 603 aa, Homo sapiens
MDRGSLLPFQLWCPRPFGTYSQNQPRPPSAALKPSACPEPGGGAEPDHGPAHSENTPPALATEVPASQPAPLLSAAAAGDEGRVLLDTWYVIKPGNTKEKVAFFVAHQCGGGSRASSMKVKGHWGSDSSKAKRRRRCLDPTKAPPDPGGREGPPAAEEGPASAGEDVDLLSVAEMVALVEQRAALALQSYPRPTTPAPVVFVSAEQGGPAKGVGSERRSGGGDCSRVAEAVAHFEAQRDSPPTKGLRKEERPGPGPGEVRIAFRISNGREPRAPDSGLPSGGGGRPGCAYPGSPGPGARAKDKITCDLYQLISPSRDALPSNVEFLLARADEASEGDSPAPARPEDTPPAPPPPPARDCGASGFHVDVVVTGVVDECIFFGKDGTKNVKEETVCLTVSPEEPPPPGQLFFLQNRGPDGPPEPPPADSPATAPGPDDAEGTADTSLCRLYRHVSHDFLEIRFKIQRLLEPRQYMLLLPEHVLVKIFSFLPTRALAALKCTCHHFKGIIEAFGVRATDSRWSRDPLYRDDPCKQCRKRYEKGDVSLCRWHPKPYHHDLPYGRSYWMCCRRADRETPGCRLGLHDNNWVLPCNGPGGGRAGREEGR

SEQ ID NO: 4025 - protein, 603 aa, Homo sapiens; identical to SEQ ID NO: 4024

SEQ ID NO: 4026 - protein, 603 aa, Homo sapiens; identical to SEQ ID NO: 4024

SEQ ID NO: 4027 - protein, 461 aa, Homo sapiens
MDRGSLLPFQLWCPRPFGTYSQNQPRPPSAALKPSACPEPGGGAEPDHGPAHSENTPPALATEVPASQPAPLLSAAAAGDEGRVLLDTWYVIKPGNTKEKVAFFVAHQCGGGSRASSMKVKGHWGSDSSKAKRRRRCLDPTKAPPDPGGREGPPAAEEGPASAGEDVDLLSVAEMVALVEQRAALALQSYPRPTTPAPVVFVSAEQGGPAKGVGSERRSGGGDCSRVAEAVAHFEAQRDSPPTKNVKEETVCLTVSPEEPPPPGQLFFLQNRGPDGPPEPPPADSPATAPGPDDAEGTADTSLCRLYRHVSHDFLEIRFKIQRLLEPRQYMLLLPEHVLVKIFSFLPTRALAALKCTCHHFKGIIEAFGVRATDSRWSRDPLYRDDPCKQCRKRYEKGDVSLCRWHPKPYHHDLPYGRSYWMCCRRADRETPGCRLGLHDNNWVLPCNGPGGGRAGREEGR

SEQ ID NO: 4028 - protein, 603 aa, Homo sapiens; identical to SEQ ID NO: 4024

SEQ ID NO: 4029 - protein, 603 aa, Homo sapiens; identical to SEQ ID NO: 4024

SEQ ID NO: 4030 - protein, 603 aa, Homo sapiens; identical to SEQ ID NO: 4024

SEQ ID NO: 4031 - protein, 461 aa, Homo sapiens; identical to SEQ ID NO: 4027

SEQ ID NO: 4032 - protein, 603 aa, Homo sapiens; identical to SEQ ID NO: 4024

SEQ ID NO: 4033 - protein, 603 aa, Homo sapiens; identical to SEQ ID NO: 4024

SEQ ID NO: 4034 - protein, 475 aa, Homo sapiens
MGMWASLDALWEMPAEKRIFGAVLLFSWTVYLWETFLAQRQRRIYKTTTHVPPELGQIMDSETFEKSRLYQLDKSTFSFWSGLYSETEGTLILLFGGIPYLWRLSGRFCGYAGFGPEYEITQSLVFLLLATLFSALTGLPWSLYNTFVIEEKHGFNQQTLGFFMKDAIKKFVVTQCILLPVSSLLLYIIKIGGDYFFIYAWLFTLVVSLVLVTIYADYIAPLFDKFTPLPEGKLKEEIEVMAKSIDFPLTKVYVVEGSKRSSHSNAYFYGFFKNKRIVLFDTLLEEYSVLNKDIQEDSGMEPRNEEEGNSEEIKAKVKNKKQGCKNEEVLAVLGHELGHWKLGHTVKNIIISQMNSFLCFFLFAVLIGRKELFAAFGFYDSQPTLIGLLIIFQFIFSPYNEVLSFCLTVLSRRFEFQADAFAKKLGKAKDLYSALIKLNKDNLGFPVSDWLFSMWHYSHPPLLERLQALKTMKQH

SEQ ID NO: 4035 - protein, 99 aa, Homo sapiens
MFSKMATYLTGELTATSEDYKLLENMNKLTSLKYLEMKDIAINISRNLKDLNQKYAGLQPYLDQINVIEEQVAALEQAAYKLDAYSKKLEAKYKKLEKR

SEQ ID NO: 4036 - protein, 142 aa, Homo sapiens
MAAAAEGVLATRSDEPARDDAAVETAEEAKEPAEADITELCRDMFSKMATYLTGELTATSEDYKLLENMNKLTSLKYLEMKDIAINISRNLKDLNQKYAGLQPYLDQINVIEEQVAALEQAAYKLDAYSKKLEAKYKKLEKR

SEQ ID NO: 4037 - protein, 631 aa, Homo sapiens
MAAHLVKRCTCLLREAARQAPAMAPVGRLRLAWVAHKTLTSSATSPISHLPGSLMEPVEKERASTPYIEKQVDHLIKKATRPEELLELLGGSHDLDSNQAAMVLIRLSHLLSEKPEDKGLLIQDAHFHQLLCLLNSQIASVWHGTLSKLLGSLYALGIPKASKELQSVEQEVRWRMRKLKYKHLAFLAESCATLSQEQHSQELLAELLTHLERRWTEIEDSHTLVTVMMKVGHLSEPLMNRLEDKCLELVEHFGPNELRKVLVMLAAQSRRSVPLLRAISYHLVQKPFSLTKDVLLDVAYAYGKLSFHQTQVSQRLATDLLSLMPSLTSGEVAHCAKSFALLKWLSLPLFEAFAQHVLNRAQDITLPHLCSVLLAFARLNFHPDQEDQFFSLVHEKLGSELPGLEPALQVDLVWALCVLQQAREAELQAVLHPEFHIQFLGGKSQKDQNTFQKLLHINATALLEYPEYSGPLLPASAVAPGPSALDRKVTPLQKELQETLKGLLGSADKGSLEVATQYGWVLDAEVLLDSDGEFLPVRDFVAPHLAQPTGSQSPPPGSKRLAFLRWEFPNFNSRSKDLLGRFVLARRHIVAAGFLIVDVPFYEWLELKSEWQKGAYLKDKMRKAVAEELAK

SEQ ID NO: 4038 - protein, 521 aa, Homo sapiens
MAAHLVKRCTCLLREAARQAPAMAPVGRLRLAWVAHKTLTSSATSPISHLPGSLMEPVEKERASTPYIEKQVDHLIKKATRPEELLELLGGSHDLDSNQAAMVLIRLSHLLSEKPEDKGLLIQDAHFHQLLCLLNSQIASVWHGTLSKLLGSLYALGIPKASKELQSVEQEVRWRMRKLKYKHLAFLAESCATLSQEQHSQELLAELLTHLERRWTEIEDSHTLVTVMMKVGHLSEPLMNRLEDKHVLNRAQDITLPHLCSVLLAFARLNFHPDQEDQFFSLVHEKLGSELPGLEPALQVDLVWALCVLQQAREAELQAVLHPEFHIQFLGGKSQKDQNTFQKLLHINATALLEYPEYSGPLLPASAVAPGPSALDRKVTPLQKELQETLKGLLGSADKGSLEVATQYGWVLDAEVLLDSDGEFLPVRDFVAPHLAQPTGSQSPPPGSKRLAFLRWEFPNFNSRSKDLLGRFVLARRHIVAAGFLIVDVPFYEWLELKSEWQKGAYLKDKMRKAVAEELAK

SEQ ID NO: 4039 - protein, 521 aa, Homo sapiens; identical to SEQ ID NO: 4038

SEQ ID NO: 4040 - protein, 757 aa, Homo sapiens
MSENSSDSDSSCGWTVISHEGSDIEMLNSVTPTDSCEPAPECSSLEQEELQALQIEQGESSQNGTVLMEETAYPALEETSSTIEAEEQKIPEDSIYIGTASDDSDIVTLEPPKLEEIGNQEVVIVEEAQSSEDFNMGSSSSSQYTFCQPETVFSSQPSDDESSSDETSNQPSPAFRRRRARKKTVSASESEDRLVAEQETEPSKELSKRQFSSGLNKCVILALVIAISMGFGHFYGTIQIQKRQQLVRKIHEDELNDMKDYLSQCQQEQESFIDYKSLKENLARCWTLTEAEKMSFETQKTNLATENQYLRVSLEKEEKALSSLQEELNKLREQIRILEDKGTSTELVKENQKLKQHLEEEKQKKHSFLSQRETLLTEAKMLKRELERERLVTTALRGELQQLSGSQLHGKSDSPNVYTEKKEIAILRERLTELERKLTFEQQRSDLWERLYVEAKDQNGKQGTDGKKKGGRGSHRAKNKSKETFLGSVKETFDAMKNSTKEFVRHHKEKIKQAKEAVKENLKKFSDSVKSTFRHFKDTTKNIFDEKGNKRFGATKEAAEKPRTVFSDYLHPQYKAPTENHHNRGPTMQNDGRKEKPVHFKEFRKNTNSKKCSPGHDCRENSHSFRKACSGVFDCAQQESMSLFNTVVNPIRMDEFRQIIQRYMLKELDTFCHWNELDQFINKFFLNGVFIHDQKLFTDFVNDVKDYLRNMKEYEVDNDGVFEKLDEYIYRHFFGHTFSPPYGPRSVYIKPCHYSSL

SEQ ID NO: 4041 - protein, 757 aa, Homo sapiens; identical to SEQ ID NO: 4040

SEQ ID NO: 4042 - protein, 337 aa, Homo sapiens
MATASPAADGGRGRPWEGGLVSWPPAPPLTLPWTWMGPSWGQHPGHWGFPALTEPSASPAAGLGIFEVRRVLDASGCSMLAPLQTGAARFSSYLLSRARKVLGSHLFSPCGVPEFCSISTRKLAAHGFGASMAAMVSFPPQRYHYFLVLDFEATCDKPQIHPQEIIEFPILKLNGRTMEIESTFHMYVQPVVHPQLTPFCTELTGIIQAMVDGQPSLQQVLERVDEWMAKEGLLDPNVKSIFVTCGDWDLKVMLPGQCQYLGLPVADYFKQWINLKKAYSFAMGCWPKNGLLDMNKGLSLQHIGRPHSGIDDCKNIANIMKTLAYRGFIFKQTSKPF

SEQ ID NO: 4043 - protein, 467 aa, Homo sapiens
MATGADVRDILELGGPEGDAASGTISKKDIINPDKKKSKKSSETLTFKRPEGMHREVYALLYSDKKDAPPLLPSDTGQGYRTVKAKLGSKKVRPWKWMPFTNPARKDGAMFFHWRRAAEEGKDYPFARFNKTVQVPVYSEQEYQLYLHDDAWTKAETDHLFDLSRRFDLRFVVIHDRYDHQQFKKRSVEDLKERYYHICAKLANVRAVPGTDLKIPVFDAGHERRRKEQLERLYNRTPEQVAEEEYLLQELRKIEARKKEREKRSQDLQKLITAADTTAEQRRTERKAPKKKLPQKKEAEKPAVPETAGIKFPDFKSAGVTLRSQRMKLPSSVGQKKIKALEQMLLELGVELSPTPTEELVHMFNELRSDLVLLYELKQACANCEYELQMLRHRHEALARAGVLGGPATPASGPGPASAEPAVTEPGLGPDPKDTIIDVVGAPLTPNSRKRRESASSSSSVKKAKKP

SEQ ID NO: 4044 - protein, 467 aa, Homo sapiens; identical to SEQ ID NO: 4043

SEQ ID NO: 4045 - protein, 467 aa, Homo sapiens; identical to SEQ ID NO: 4043

SEQ ID NO: 4046 - protein, 820 aa, Homo sapiens
MAGELADKKDRDASPSKEERKRSRTPDRERDRDRDRKSSPSKDRKRHRSRDRRRGGSRSRSRSRSKSAERERRHKERERDKERDRNKKDRDRDKDGHRRDKDRKRSSLSPGRGKDFKSRKDRDSKKDEEDEHGDKKPKAQPLSLEELLAKKKAEEEAEAKPKFLSKAEREAEALKRRQQEVEERQRMLEEERKKRKQFQDLGRKMLEDPQERERRERRERMERETNGNEDEEGRQKIREEKDKSKELHAIKERYLGGIKKRRRTRHLNDRKFVFEWDASEDTSIDYNPLYKERHQVQLLGRGFIAGIDLKQQKREQSRFYGDLMEKRRTLEEKEQEEARLRKLRKKEAKQRWDDRHWSQKKLDEMTDRDWRIFREDYSITTKGGKIPNPIRSWKDSSLPPHILEVIDKCGYKEPTPIQRQAIPIGLQNRDIIGVAETGSGKTAAFLIPLLVWITTLPKIDRIEESDQGPYAIILAPTRELAQQIEEETIKFGKPLGIRTVAVIGGISREDQGFRLRMGCEIVIATPGRLIDVLENRYLVLSRCTYVVLDEADRMIDMGFEPDVQKILEHMPVSNQKPDTDEAEDPEKMLANFESGKHKYRQTVMFTATMPPAVERLARSYLRRPAVVYIGSAGKPHERVEQKVFLMSESEKRKKLLAILEQGFDPPIIIFVNQKKGCDVLAKSLEKMGYNACTLHGGKGQEQREFALSNLKAGAKDILVATDVAGRGIDIQDVSMVVNYDMAKNIEDYIHRIGRTGRAGKSGVAITFLTKEDSAVFYELKQAILESPVSSCPPELANHPDAQHKPGTILTKKRREETIFA

SEQ ID NO: 4047 - protein, 128 aa, Homo sapiens
MAGGKAGKDSGKAKTKAVSRSQRAGLQFPVGRIHRHLKSRTTSHGRVGATAAVYSAAILEYLTAEVLELAGNASKDLKVKRITPRHLQLAIRGDEELDSLIKATIAGGGVIPHIHKSLIGKKGQQKTV

SEQ ID NO: 4048 - protein, 452 aa, Homo sapiens
MAAAALRSGWCRCPRRCLGSGIQFLSSHNLPHGSTYQMRRPGGELPLSKSYSSGNRKGFLSGLLDNVKQELAKNKEMKESIKKFRDEARRLEESDVLQEARRKYKTIESETVRTSEVLRKKLGELTGTVKESLHEVSKSDLGRKIKEGVEEAAKTAKQSAESVSKGGEKLGRTAAFRALSQGVESVKKEIDDSVLGQTGPYRRPQRLRKRTEFAGDKFKEEKVFEPNEEALGVVLHKDSKWYQQWKDFKENNVVFNRFFEMKMKYDESDNAFIRASRALTDKVTDLLGGLFSKTEMSEVLTEILRVDPAFDKDRFLKQCENDIIPNVLEAMISGELDILKDWCYEATYSQLAHPIQQAKALGLQFHSRILDIDNVDLAMGKMMEQGPVLIITFQAQLVMVVRNPKGEVVEGDPDKVLRMLYVWALCRDQDELNPYAAWRLLDISASSTEQIL

SEQ ID NO: 4049 - protein, 1053 aa, Homo sapiens
MFGRSRSWVGGGHGKTSRNIHSLDHLKYLYHVLTKNTTVTEQNRNLLVETIRSITEILIWGDQNDSSVFDFFLEKNMFVFFLNILRQKSGRYVCVQLLQTLNILFENISHETSLYYLLSNNYVNSIIVHKFDFSDEEIMAYYISFLKTLSLKLNNHTVHFFYNEHTNDFALYTEAIKFFNHPESMVRIAVRTITLNVYKVSLDNQAMLHYIRDKTAVPYFSNLVWFIGSHVIELDDCVQTDEEHRNRGKLSDLVAEHLDHLHYLNDILIINCEFLNDVLTDHLLNRLFLPLYVYSLENQDKGGERPKISLPVSLYLLSQVFLIIHHAPLVNSLAEVILNGDLSEMYAKTEQDIQRSSAKPSIRCFIKPTETLERSLEMNKHKGKRRVQKRPNYKNVGEEEDEEKGPTEDAQEDAEKAKGTEGGSKGIKTSGESEEIEMVIMERSKLSELAASTSVQEQNTTDEEKSAAATCSESTQWSRPFLDMVYHALDSPDDDYHALFVLCLLYAMSHNKGMDPEKLERIQLPVPNAAEKTTYNHPLAERLIRIMNNAAQPDGKIRLATLELSCLLLKQQVLMSAGCIMKDVHLACLEGAREESVHLVRHFYKGEDIFLDMFEDEYRSMTMKPMNVEYLMMDASILLPPTGTPLTGIDFVKRLPCGDVEKTRRAIRVFFMLRSLSLQLRGEPETQLPLTREEDLIKTDDVLDLNNSDLIACTVITKDGGMVQRFLAVDIYQMSLVEPDVSRLGWGVVKFAGLLQDMQVTGVEDDSRALNITIHKPASSPHSKPFPILQATFIFSDHIRCIIAKQRLAKGRIQARRMKMQRIAALLDLPIQPTTEVLGFGLGSSTSTQHLPFRFYDQGRRGSSDPTVQRSVFASVDKVPGFAVAQCINQHSSPSLSSQSPPSASGSPSGSGSTSHCDSGGTSSSSTPSTAQSPADAPMSPELPKPHLPDQLVIVNETEADSKPSKNVARSAAVETASLSPSLVPARQPTISLLCEDTADTLSVESLTLVPPVDPHSLRSLTGMPPLSTPAAACTEPVGEEAACAEPVGTAED

SEQ ID NO: 4050 - protein, 194 aa, Homo sapiens
MENFTALFGAQADPPPPPTALGFGPGKPPPPPPPPAGGGPGTAPPPTAATAPPGADKSGAGCGPFYLMRELPGSTELTGSTNLITHYNLEQAYNKFCGKKVKEKLSNFLPDLPGMIDLPGSHDNSSLRSLIEKPPILSSSFNPITGTMLAGFRLHTGPLPEQCRLMHIQPPKKKNKHKHKQSRTQDPVPPGKPS

SEQ ID NO: 4051 - protein, 346 aa, Homo sapiens
MALDVKSRAKRYEKLDFLGEGQFATVYKARDKNTNQIVAIKKIKLGHRSEAKDGINRTALREIKLLQELSHPNIIGLLDAFGHKSNISLVFDFMETDLEVIIKDNSLVLTPSHIKAYMLMTLQGLEYLHQHWILHRDLKPNNLLLDENGVLKLADFGLAKSFGSPNRAYTHQVVTRWYRAPELLFGARMYGVGVDMWAVGCILAELLLRVPFLPGDSDLDQLTRIFETLGTPTEEQWPDMCSLPDYVTFKSFPGIPLHHIFSAAGDDLLDLIQGLFLFNPCARITATQALKMKYFSNRPGPTPGCQLPRPNCPVETLKEQSNPALAIKRKRTEALEQGGLPKKLIF

SEQ ID NO: 4052 - protein, 326 aa, Homo sapiens
MLLSKFGSLAHLCGPGGVDHLPVKILQPAKADKESFEKAYQVGAVLGSGGFGTVYAGSRIADGLPVAVKHVVKERVTEWGSLGGATVPLEVVLLRKVGAAGGARGVIRLLDWFERPDGFLLVLERPEPAQDLFDFITERGALDEPLARRFFAQVLAAVRHCHSCGVVHRDIKDENLLVDLRSGELKLIDFGSGALLKDTVYTDFDGTRVYSPPEWIRYHRYHGRSATVWSLGVLLYDMVCGDIPFEQDEEILRGRLLFRRRVSPECQQLIRWCLSLRPSERPSLDQIAAHPWMLGADGGAPESCDLRLCTLDPDDVASTTSSSESL

SEQ ID NO: 4053 - protein, 1341 aa, Homo sapiens
MWRRKHPRTSGGTRGVLSGNRGVEYGSGRGHLGTFEGRWRKLPKMPEAVGTDPSTSRKMAELEEVTLDGKPLQALRVTDLKAALEQRGLAKSGQKSALVKRLKGALMLENLQKHSTPHAAFQPNSQIGEEMSQNSFIKQYLEKQQELLRQRLEREAREAAELEEASAESEDEMIHPEGVASLLPPDFQSSLERPELELSRHSPRKSSSISEEKGDSDDEKPRKGERRSSRVRQARAAKLSEGSQPAEEEEDQETPSRNLRVRADRNLKTEEEEEEEEEEEEDDEEEEGDDEGQKSREAPILKEFKEEGEEIPRVKPEEMMDERPKTRSQEQEVLERGGRFTRSQEEARKSHLARQQQEKEMKTTSPLEEEEREIKSSQGLKEKSKSPSPPRLTEDRKKASLVALPEQTASEEETPPPLLTKEASSPPPHPQLHSEEEIEPMEGPAPPVLIQLSPPNTDADTRELLVSQHTVQLVGGLSPLSSPSDTKAESPAEKVPEESVLPLVQKSTLADYSAQKDLEPESDRSAQPLPLKIEELALAKGITEECLKQPSLEQKEGRRASHTLLPSHRLKQSADSSSSRSSSSSSSSSRSRSRSPDSSGSRSHSPLRSKQRDVAQARTHANPRGRPKMGSRSTSESRSRSRSRSRSASSNSRKSLSPGVSRDSSTSYTETKDPSSGQEVATPPVPQLQVCEPKERTSTSSSSVQARRLSQPESAEKHVTQRLQPERGSPKKCEAEEAEPPAATQPQTSETQTSHLPESERIHHTVEEKEEVTMDTSENRPENDVPEPPMPIADQVSNDDRPEGSVEDEEKKESSLPKSFKRKISVVSATKGVPAGNSDTEGGQPGRKRRWGASTATTQKKPSISITTESLKSLIPDIKPLAGQEAVVDLHADDSRISEDETERNGDDGTHDKGLKICRTVTQVVPAEGQENGQREEEEEEKEPEAEPPVPPQVSVEVALPPPAEHEVKKVTLGDTLTRRSISQQKSGVSITIDDPVRTAQVPSPPRGKISNIVHISNLVRPFTLGQLKELLGRTGTLVEEAFWIDKIKSHCFVTYSTVEEAVATRTALHGVKWPQSNPKFLCADYAEQDELDYHRGLLVDRPSETKTEEQGIPRPLHPPPPPPVQPPQHPRAEQREQERAVREQWAEREREMERRERTRSEREWDRDKVREGPRSRSRSRDRRRKERAKSKEKKSEKKEKAQEEPPAKLLDDLFRKTKAAPCIYWLPLTDSQIVQKEAERAERAKEREKRRKEQEEEEQKEREKEAERERNRQLEREKRREHSRERDRERERERERDRGDRDRDRERDRERGRERDRRDTKRHSRSRSRSTPVRDRGGRR

SEQ ID NO: 4054 - protein, 475 aa, Homo sapiens
MAGRPHPYDGNSSDPENWDRKLHSRPRKLYKHSSTSSRIAKGGVDHTKMSLHGASGGHERSRDRRRSSDRSRDSSHERTESQLTPCIRNVTSPTRQHHVEREKDHSSSRPSSPRPQKASPNGSISSAGNSSRNSSQSSSDGSCKTAGEMVFVYENAKEGARNIRTSERVTLIVDNTRFVVDPSIFTAQPNTMLGRMFGSGREHNFTRPNEKGEYEVAEGIGSTVFRAILDYYKTGIIRCPDGISIPELREACDYLCISFEYSTIKCRDLSALMHELSNDGARRQFEFYLEEMILPLMVASAQSGERECHIVVLTDDDVVDWDEEYPPQMGEEYSQIIYSTKLYRFFKYIENRDVAKSVLKERGLKKIRLGIEGYPTYKEKVKKRPGGRPEVIYNYVQRPFIRMSWEKEEGKSRHVDFQCVKSKSITNLAAAAADIPQDQLVVMHPTPQVDELDILPIHPPSGNSDLDPDAQNPML

SEQ ID NO: 4055 - protein, 372 aa, Homo sapiens
MSRRRFDCRSISGLLTTTPQIPIKMENFNNFYILTSKELGRGKFAVVRQCISKSTGQEYAAKFLKKRRRGQDCRAEILHEIAVLELAKSCPRVINLHEVYENTSEIILILEYAAGGEIFSLCLPELAEMVSENDVIRLIKQILEGVYYLHQNNIVHLDLKPQNILLSSIYPLGDIKIVDFGMSRKIGHACELREIMGTPEYLAPEILNYDPITTATDMWNIGIIAYMLLTHTSPFVGEDNQETYLNISQVNVDYSEETFSSVSQLATDFIQSLLVKNPEKRPTAEICLSHSWLQQWDFENLFHPEETSSSSQTQDHSVRSSEDKTSKSSCNGTCGDREDKENIPEDSSMVSKRFRFDDSLPNPHELVSDLLC

SEQ ID NO: 4056 - protein, 1494 aa, Homo sapiens
MYSEWRSLHLVIQNDQGHTSVLHSYPESVGREVANAVVRPLGQVLGTPSVAGSENLLKTDKEVKWTMEVICYGLTLPLDGETVKYCVDVYTDWIMALVLPKDSIPLPVIKEPNQYVQTILKHLQNLFVPRQEQGSSQIRLCLQVLRAIQKLARESSLMARETWEVLLLFLLQINDILLAPPTVQGGIAENLAEKLIGVLFEVWLLACTRCFPTPPYWKTAKEMVANWRHHPAVVEQWSKVICALTSRLLRFTYGPSFPAFKVPDEDASLIPPEMDNECVAQTWFRFLHMLSNPVDLSNPAIISSTPKFQEQFLNVSGMPQELNQYPCLKHLPQIFFRAMRGISCLVDAFLGISRPRSDSAPPTPVNRLSMPQSAAVSTTPPHNRRHRAVTVNKATMKTSTVSTAHASKVQHQTSSTSPLSSPNQTSSEPRPLPAPRRPKVNSILNLFGSWLFDAAFVHCKLHNGINRDSSMTAITTQASMEFRRKGSQMSTDTMVSNPMFDASEFPDNYEAGRAEACGTLCRIFCSKKTGEEILPAYLSRFYMLLIQGLQINDYVCHPVLASVILNSPPLFCCDLKGIDVVVPYFISALETILPDRELSKFKSYVNPTELRRSSINILLSLLPLPHHFGTVKSEVVLEGKFSNDDSSSYDKPITFLSLKLRLVNILIGALQTETDPNNTQMILGAMLNIVQDSALLEAIGCQMEMGGGENNLKSHSRTNSGISSASGGSTEPTTPDSERPAQALLRDYALNTDSAAGLLIRSIHLVTQRLNSQWRQDMSISLAALELLSGLAKVKVMVDSGDRKRAISSVCTYIVYQCSRPAPLHSRDLHSMIVAAFQCLCVWLTEHPDMLDEKDCLKEVLEIVELGISGSKSKNNEQEVKYKGDKEPNPASMRVKDAAEATLTCIMQLLGAFPSPSGPASPCSLVNETTLIKYSRLPTINKHSFRYFVLDNSVILAMLEQPLGNEQNDFFPSVTVLVRGMSGRLAWAQQLCLLPRGAKANQKLFVPEPRPVPKNDVGFKYSVKHRPFPEEVDKIPFVKADLSIPDLHEIVTEELEERHEKLRSGMAQQIAYEIHLEQQSEEELQKRSFPDPVTDCKPPPPAQEFQTARLFLSHFGFLSLEALKEPANSRLPPHLIALDSTIPGFFDDIGYLDLLPCRPFDTVFIFYMKPGQKTNQEILKNVESSRTVQPHFLEFLLSLGWSVDVGRHPGWTGHVSTSWSINCCDDGEGSQQEVISSEDIGASIFNGQKKVLYYADALTEIAFVVPSPVESLTDSLESNISDQDSDSNMDLMPGILKQPSLTLELFPNHTDNLNSSQRLSPSSRMRKLPQGRPVPPLGPETRVSVVWVERYDDIENFPLSELMTEISTGVETTANSSTSLRSTTLEKEVPVIFIHPLNTGLFRIKIQGATGKFNMVIPLVDGMIVSRRALGFLVRQTVINICRRKRLESDSYSPPHVRRKQKITDIVNKYRNKQLEPEFYTSLFQEVGLKNCSS

SEQ ID NO: 4057 - protein, 615 aa, Homo sapiens
MAVYVGMLRLGRLCAGSSGVLGARAALSRSWQEARLQGVRFLSSREVDRMVSTPIGGLSYVQGCTKKHLNSKTVVQCLETTAQRVPEREALVVLHEDVRLTFAQLKEEVDKAASGLLSIGLCKGDRLGMWGPNSYAWVLMQLATAQAGIILVSVNPAYQAMELEYVLKKVGCKALVFPKQFKTQQYYNVLKQICPEVENAQPGALKSQRLPDLTTVISVDAPLPGTLLLDEVVAAGSTRQHLDQLQYNQQFLSCHDPINIQFTSGTTGSPKGATLSHYNIVNNSNILGERLKLHEKTPEQLRMILPNPLYHCLGSVAGTMMCLMYGATLILASPIFNGKKALEAISRERGTFLYGTPTMFVDILNQPDFSSYDISTMCGGVIAGSPAPPELIRAIINKINMKDLVVAYGTTENSPVTFAHFPEDTVEQKAESVGRIMPHTEARIMNMEAGTLAKLNTPGELCIRGYCVMLGYWGEPQKTEEAVDQDKWYWTGDVATMNEQGFCKIVGRSKDMIIRGGENIYPAELEDFFHTHPKVQEVQVVGVKDDRMGEEICACIRLKDGEETTVEEIKAFCKGKISHFKIPKYIVFVTNYPLTISGKIQKFKLREQMERHLNL

SEQ ID NO: 4058 - protein, 189 aa, Homo sapiens
MDAVDATMEKLRAQCLSRGASGIQGLARFFRQLDRDGSRSLDADEFRQGLAKLGLVLDQAEAEGVCRKWDRNGSGTLDLEEFLRALRPPMSQAREAVIAAAFAKLDRSGDGVVTVDDLRGVYSGRAHPKVRSGEWTEDEVLRRFLDNFDSSEKDGQVTLAEFQDYYSGVSASMNTDEEFVAMMTSAWQL

SEQ ID NO: 4059 - protein, 162 aa, Homo sapiens
MDAVDATMEKLRAQCLSRGASGIQGLARFFRQLDRDGSRSLDADEFRQGLAKLGLVLDQAEAEGVCRKWDRNGSGTLDLEEFLRALRPPMSQAREAVIAAAFAKLDRSGDGVVTVDDLRGVYSGRAHPKVTLAEFQDYYSGVSASMNTDEEFVAMMTSAWQL

SEQ ID NO: 4060 - protein, 548 aa, Homo sapiens
MQPGLSPGSPGDPRPPTPETDYPESLTSYPEEDYSPVGSFGEPGPTSPLTTPPGWSCHVSQDKQMLYTNHFTQEQWVRLEDPHGKPYFYNPEDSSVRWELPQVPVPAPRSIHKSSQDGDTPAQASPPEEKVPAELDEVGSWEEVSPATAAVRTKTLDKAGVLHRTKTADKGKRLRKKHWSASWTVLEGGVLTFFKDSKTSAAGGLRQPSKFSTPEYTVELRGATLSWAPKDKSSRKNVLELRSRDGSEYLIQHDSEAIISTWHKAIAQGIQELSAELPPEESESSRVDFGSSERLGSWQEKEEDARPNAAAPALGPVGLESDLSKVRHKLRKFLQRRPTLQSLREKGYIKDQVFGCALAALCERERSRVPRFVQQCIRAVEARGLDIDGLYRISGNLATIQKLRYKVDHDERLDLDDGRWEDVHVITGALKLFFRELPEPLFPFSHFRQFIAAIKLQDQARRSRCVRDLVRSLPAPNHDTLRMLFQHLCRVIEHGEQNRMSVQSVAIVFGPTLLRPEVEETSMPMTMVFQNQVVELILQQCADIFPPH

SEQ ID NO: 4061 - protein, 486 aa, Homo sapiens
MIRRVLPHGMGRGLLTRRPGTRRGGFSLDWDGKVSEIKKKIKSILPGRSCDLLQDTSHLPPEHSDVVIVGGGVLGLSVAYWLKKLESRRGAIRVLVVERDHTYSQASTGLSVGGICQQFSLPENIQLSLFSASFLRNINEYLAVVDAPPLDLRFNPSGYLLLASEKDAAAMESNVKVQRQEGAKVSLMSPDQLRNKFPWINTEGVALASYGMEDEGWFDPWCLLQGLRRKVQSLGVLFCQGEVTRFVSSSQRMLTTDDKAVVLKRIHEVHVKMDRSLEYQPVECAIVINAAGAWSAQIAALAGVGEGPPGTLQGTKLPVEPRKRYVYVWHCPQGPGLETPLVADTSGAYFRREGLGSNYLGGRSPTEQEEPDPANLEVDHDFFQDKVWPHLALRVPAFETLKVQSAWAGYYDYNTFDQNGVVGPHPLVVNMYFATGFSGHGLQQAPGIGRAVAEMVLKGRFQTIDLSPFLFTRFYLGEKIQENNII

SEQ ID NO: 4062 - protein, 1202 aa, Homo sapiens
MMCEVMPTISEAEGPPGGGGGHGSGSPSQPDADSHFEQLMVSMLEERDRLLDTLRETQETLALTQGKLHEVGHERDSLQRQLNTALPQEFAALTKELNVCREQLLEREEEIAELKAERNNTRLLLEHLECLVSRHERSLRMTVVKRQAQSPAGVSSEVEVLKALKSLFEHHKALDEKVRERLRVALERCSLLEEELGATHKELMILKEQNNQKKTLTDGVLDINHEQENTPSTSGKRSSDGSLSHEEDLAKVIELQEIISKQSREQSQMKERLASLSSHVTELEEDLDTARKDLIKSEEMNTKLQRDVREAMAQKEDMEERITTLEKRYLAAQREATSVHDLNDKLENEIANKDSMHRQTEDKNRQLQERLELAEQKLQQTLRKAETLPEVEAELAQRVAALSKAEERHGNIEERLRQMEAQLEEKNQELQRARQREKMNEEHNKRLSDTVDKLLSESNERLQLHLKERMAALEDKNSLLREVESAKKQLEETQHDKDQLVLNIEALRAELDHMRLRGASLHHGRPHLGSVPDFRFPMADGHTDSYSTSAVLRRPQKGRLAALRDEPSKVQTLNEQDWERAQQASVLANVAQAFESDADVSDGEDDRDTLLSSVDLLSPSGQADAHTLAMMLQEQLDAINKEIRLIQEEKENTEQRAEEIESRVGSGSLDNLGRFRSMSSIPPYPASSLASSSPPGSGRSTPRRIPHSPAREVDRLGVMTLLPPSREEVRDDKTTIKCETSPPSSPRALRLDRLHKGALHTVSHEDIRDIRNSTGSQDGPVSNPSSSNSSQDSLHKAPKKKGIKSSIGRLFGKKEKGRPGQTGKEALGQAGVSETDNSSQDALGLSKLGGQAEKNRKLQKKHELLEEARRQGLPFAQWDGPTVVVWLELWVGMPAWYVAACRANVKSGAIMSALSDTEIQREIGISNPLHRLKLRLAIQEIMSLTSPSAPPTSRTTLAYGDMNHEWIGNEWLPSLGLPQYRSYFMECLVDARMLDHLTKKDLRGQLKMVDSFHRNSFQCGIMCLRRLNYDRKELERKREESQSEIKDVLVWSNDRVIRWILSIGLKEYANNLIESGVHGALLALDETFDFSALALLLQIPTQNTQARAVLEREFNNLLVMGTDRRFDEDDDKSFRRAPSWRKKFRPKDIRGLAAGSAETLPANFRVTSSMSSPSMQPKKMQMDGNVSGTQRLDSATVRTYSC

SEQ ID NO: 4063 - protein, 1185 aa, Homo sapiens
MMCEVMPTISEAEGPPGGGGGHGSGSPSQPDADSHFEQLMVSMLEERDRLLDTLRETQETLALTQGKLHEVGHERDSLQRQLNTALPQEFAALTKELNVCREQLLEREEEIAELKAERNNTRLLLEHLECLVSRHERSLRMTVVKRQAQSPAGVSSEVEVLKALKSLFEHHKALDEKVRERLRVALERCSLLEEELGATHKELMILKEQNNQKKTLTDGVLDINHEQENTPSTSGKRSSDGSLSHEEDLAKVIELQEIISKQSREQSQMKERLASLSSHVTELEEDLDTARKDLIKSEEMNTKLQRDVREAMAQKEDMEERITTLEKRYLAAQREATSVHDLNDKLENEIANKDSMHRQTEDKNRQLQERLELAEQKLQQTLRKAETLPEVEAELAQRVAALSKAEERHGNIEERLRQMEAQLEEKNQELQRARQREKMNEEHNKRLSDTVDKLLSESNERLQLHLKERMAALEDKNSLLREVESAKKQLEETQHDKDQLVLNIEALRAELDHMRLRGASLHHGRPHLGSVPDFRFPMADGHTDSYSTSAVLRRPQKGRLAALRDEPSKVQTLNEQDWERAQQASVLANVAQAFESDADVSDGEDDRDTLLSSVDLLSPSGQADAHTLAMMLQEQLDAINKEIRLIQEEKENTEQRAEEIESRVGSGSLDNLGRFRSMSSIPPYPASSLASSSPPGSGRSTPRRIPHSPAREVDRLGVMTLLPPSREEVRDDKTTIKCETSPPSSPRALRLDRLHKGALHTVSHEDIRDIRNSTGSQDGPVSNPSSSNSSQDSLHKAPKKKGIKSSIGRLFGKKEKGRPGQTGKEALGQAGVSETDNSSQDALGLSKLGGQAEKNRKLQKKHELLEEARRQGLPFAQWDGPTVVVWLELWVGMPAWYVAACRANVKSGAIMSALSDTEIQREIGISNPLHRLKLRLAIQEIMSLTSPSAPPTSRTTLAYGDMNHEWIGNEWLPSLGLPQYRSYFMECLVDARMLDHLTKKDLRGQLKMVDSFHRNSFQCGIMCLRRLNYDRKELERKREESQSEIKDVLVWSNDRVIRWILSIGLKEYANNLIESGVHGALLALDETFDFSALALLLQIPTQNTQARAVLEREFNNLLVMGTDRRFDEDDDKSFRRAPSWRKKFRPKDIRGLAAGSAETLPANFRVTSSMSSPSMQPKKMQMDGM

SEQ ID NO: 4064 - protein, 315 aa, Homo sapiens
MVQQRGARAKRDGGPPPPGPGPAEEGAREPGWCKTPSGHIKRPMNAFMVWSQHERRKIMDQWPDMHNAEISKRLGRRWQLLQDSEKIPFVREAERLRLKHMADYPDYKYRPRKKSKGAPAKARPRPPGGSGGGSRLKPGPQLPGRGGRRAAGGPLGGGAAAPEDDDEDDDEELLEVRLVETPGRELWRMVPAGRAARGQAERAQGPSGEGAAAAAAASPTPSEDEEPEEEEEEAAAAEEGEEETVASGEESLGFLSRLPPGPAGLDCSALDRDPDLQPPSGTSHFEFPDYCTPEVTEMIAGDWRPSSIADLVFTY

SEQ ID NO: 4065 - protein, 484 aa, Homo sapiens
MVNVKALCEPEVSNCWMNVITGTGSVSSPLLVLPQPGPETSLMTGEPVDDEDATVNKIALELCTFTLAIALGAVLLLPFSIISNEVLLSLPRNYYIQWLNGSLIHGLWNLVFLFSNLSLIFLMPFAYFFTESEGFAGSRKGVLGRVYETVVTLMLLTLLVLGMVWVASAIVDKNKANRESLYDFWEYYLPYLYSCISFLGVLLLLVCTPLGLARMFSVTGKLLVKPRLLEDLEEQLYCSAFEEAALTRRICNPTSCWLPLDMELLHRQVLALQTQRVLLEKRRKASAWQRNLGYPLAMLCLLVLTGLSVLIVAIHILELLIDEAAMPRVMQGTSLGQVSFSKLGSFGAVIQVVLIFYLMVSSVVGFYSSPLFRSLRPRWHDTAMTQIIGNCVCLLVLSSALPVFSRTLGLTRFDLLGDFGRFNWLGNFYIVFLYNAAFAGLTTLCLVKTFTAAVRAELIRAFGLDRLPLPVSGFPQASRKTQHQ

SEQ ID NO: 4066 - protein, 1179 aa, Homo sapiens
MKLKELERPAVQAWSPASQYPLYLATGTSAQQLDSSFSTNGTLEIFEVDFRDPSLDLKHRGVLSALSRFHKLVWGSFGSGLLESSGVIVGGGDNGMLILYNVTHILSSGKEPVIAQKQKHTGAVRALDLNPFQGNLLASGASDSEIFIWDLNNLNVPMTLGSKSQQPPEDIKALSWNRQAQHILSSAHPSGKAVVWDLRKNEPIIKVSDHSNRMHCSGLAWHPDIATQLVLCSEDDRLPVIQLWDLRFASSPLKVLESHSRGILSVSWSQADAELLLTSAKDSQILCRNLGSSEVVYKLPTQSSWCFDVQWCPRDPSVFSAASFNGWISLYSVMGRSWEVQHMRQADKISSSFSKGQPLPPLQVPEQVAQAPLIPPLKKPPKWIRRPTGVSFAFGGKLVTFGLPSTPAHLVPQPCPRLVFISQVTTESEFLMRSAELQEALGSGNLLNYCQNKSQQALLQSEKMLWQFLKVTLEQDSRMKFLKLLGYSKDELQKKVATWLKSDVGLGESPQPKGNDLNSDRQQAFCSQASKHTTKEASASSAFFDELVPQNMTPWEIPITKDIDGLLSQALLLGELGPAVELCLKEERFADAIILAQAGGTDLLKQTQERYLAKKKTKISSLLACVVQKNWKDVVCTCSLKNWREALALLLTYSGTEKFPELCDMLGTRMEQEGSRALTSEARLCYVCSGSVERLVECWAKCHQALSPMALQDLMEKVMVLNRSLEQLRGPHGVSPGPATTYRVTQYANLLAAQGSLATAMSFLPRDCAQPPVQQLRDRLFHAQGSAVLGQQSPPFPFPRIVVGATLHSKETSSYRLGSQPSHQVPTPSPRPRVFTPQSSPAMPLAPSHPSPYQGPRTQNISDYRAPGPQAIQPLPLSPGVRPASSQPQLLGGQRVQVPNPVGFPGTWPLPGSPLPMACPGIMRPGSTSLPETPRLFPLLPLRPLGPGRMVSHTPAPPASFPVPYLPGDPGAPCSSVLPTTGILTPHPGPQDSWKEAPAPRGNLQRNKLPETFMPPAPITAPVMSLTPELQGILPSQPPVSSVSHAPPGVPGELSLQLQHLPPEKMERKELPPEHQSLKSSFEALLQRCSLSATDLKTKRKLEEAAQRLEYLYEKLCEGTLSPHVVAGLHEVARCVDAGSFEQGLAVHAQVAGCSSFSEVSSFMPILKAVLIIAHKLLV

SEQ ID NO: 4067 - protein, 349 aa, Homo sapiens
MKLKELERPAVQAWSPASQYPLYLATGTSAQQLDSSFSTNGTLEIFEVDFRDPSLDLKHRGVLSALSRFHKLVWGSFGSGLLESSGVIVGGGDNGMLILYNVTHILSSGKEPVIAQKQKHTGAVRALDLNPFQGNLLASGASDSEIFIWDLNNLNVPMTLGSKSQQPPEDIKALSWNRQAQHILSSAHPSGKAVVWDLRKNEPIIKVSDHSNRMHCSGLAWHPDIATQLVLCSEDDRLPVIQLWDLRFASSPLKVLESHSRGILSVSWSQADAELLLTSAKDSQILCRNLGSSEVVYKLPTQSSWCFDVQWCPRDPSVFSAASFNGWISLYSVMGRSWEVQHMRQADKV

SEQ ID NO: 4068 - protein, 403 aa, Homo sapiens [sequence omitted]

SEQ ID NO: 4069 - protein, 995 aa, Homo sapiens
MSSLPRRAKVQVQDVVLKDEFSSFSELSSASEEDDKEDSAWEPQKKVPRSRKQPPPKESKPKRMPRVKKNAPQISDGSEVVVVKEELNSSVAIADTALEDRKNKLDTVQTLKTAKTKQKCAAQPHTVRRTKKLKVEEETSKASNLEGESNSSETPSTSTVWGGTCKKEENDDDFTFGQSALKKIKTETYPQGQPVKFPANANSTKEEVEMNWDMVQVLSERTNIEPWVCANIIRLFNDDNTIPFIIRYRKELINNLDADSLREVQQTLEELRAVAKKVHSTIQKIKKEGKMSECLLKAMLNCKTFEELEHVSAPYKTGSKGTKAQRARQLGLEGAARALLEKPGELSLLSYIRPDVKGLSTLQDIEIGVQHILADMIAKDKDTLDFIRNLCQKRHVCIQSSLAKVSSKKVNEKDVDKFLLYQHFSCNIRNIHHHQILAINRGENLKVLTVKVNISDGVKDEFCRWCIQNRWRPRSFARPELMKILYNSLNDSFKRLIYPLLCREFRAKLTSDAEKESVMMFGRNLRQLLLTSPVPGRTLMGVDPGYKHGCKLAIISPTSQILHTDVVYLHCGQGFREAEKIKTLLLNFNCSTVVIGNGTACRETEAYFADLIMKNYFAPLDVVYCIVSEAGASIYSVGPEANKEMPGLDPNLRSAVSIARRVQDPLAELVKIEPKHIGVGMYQHDVSQTLLKATLDSVVEECVSFVGVDINICSEVLLRHIAGLNANRAKNIIEWREKNGPFINREQLKKVKGLGPKSFQQCAGFIRINQDYIRTFCSQQTETSGQIQGVAVTSSADVEVTNEKQGKKKSKTAVNVLLKPNPLDQTCIHPESYDIAMRFLSSIGGTLYEVGKPEMQQKINSFLEKEGMEKIAERLQTTVHTLQVIIDGLSQPESFDFRTDFDKPDFKRSIVCLEDLQIGTVLTGKVENATLFGIFVDIGVGKSGLIPIRNVTEAKLSKTKKRRSLGLGPGERVEVQVLNIDIPRSRITLDLIRVL

SEQ ID NO: 4070 - protein, 121 aa, Homo sapiens
MGRIFLDHIGGTRLFSCANCDTILTNRSELISTRFTGATGRAFLFNKVVNLQYSEVQDRVMLTGRHMVRDVSCKNCNSKLGWIYEFATEDSQRYKEGRVILERALVRESEGFEEHVPSDNS

SEQ ID NO: 4071 - protein, 683 aa, Homo sapiens
MASGPGSQEREGLLIVKLEEDCAWSQELPPPDPGPSPEASHLRFRRFRFQEAAGPREALSRLQELCHGWLRPEMRTKEQILELLVLEQFLTILPQEIQSRVQELHPESGEEAVTLVEDMQRELGRLRQQVTNHGRGTEVLLEEPLPLETARESPSFKLEPMETERSPGPRLQELLGPSPQRDPQAVKERALSAPWLSLFPPEGNMEDKEMTGPQLPESLEDVAMYISQEEWGHQDPSKRALSRDTVQESYENVDSLESHIPSQEVPGTQVGQGGKLWDPSVQSCKEGLSPRGPAPGEEKFENLEGVPSVCSENIHPQVLLPDQARGEVPWSPELGRPHDRSQGDWAPPPEGGMEQALAGASSGRELGRPKELQPKKLHLCPLCGKNFSNNSNLIRHQRIHAAERLCMGVDCTEIFGGNPRFLSLHRAHLGEEAHKCLECGKCFSQNTHLTRHQRTHTGEKPYQCNICGKCFSCNSNLHRHQRTHTGEKPYKCPECGEIFAHSSNLLRHQRIHTGERPYKCPECGKSFSRSSHLVIHERTHERERLYPFSECGEAVSDSTPFLTNHGAHKAEKKLFECLTCGKSFRQGMHLTRHQRTHTGEKPYKCTLCGENFSHRSNLIRHQRIHTGEKPYTCHECGDSFSHSSNRIRHLRTHTGERPYKCSECGESFSRSSRLMSHQRTHTG

SEQ ID NO: 4072 - protein, 183 aa, Homo sapiens
MTTASTSQVRQNYHQDSEAAINRQINLELYASYVYLSMSYYFDRDDVALKNFAKYFLHQSHEEREHAEKLMKLQNQRGGRIFLQDIKKPDCDDWESGLNAMECALHLEKNVNQSLLELHKLATDKNDPHLCDFIETHYLNEQVKAIKELGDHVTNLRKMGAPESGLAEYLFDKHTLGDSDNES

SEQ ID NO: 4073 - protein, 421 aa, Homo sapiens
MTPISQVRMRKGSAHTAAQPGRLGLHPAGATAHACRGMTSIRARPGLTSAMLGSRAAGFARGLRALALAWLPGWRGRSFALARAAGAPHGGDLQPPACPEPRGRQLSLSAAAVVDSAPRPLQPYLRLMRLDKPIGTWLLYLPCTWSIGLAAEPGCFPDWYMLSLFGTGAILMRGAGCTINDMWDQDYDKKVTRTANRPIAAGDISTFQSFVFLGGQLTLALGVLLCLNYYSIALGAGSLLLVITYPLMKRISYWPQLALGLTFNWGALLGWSAIKGSCDPSVCLPLYFSGVMWTLIYDTIYAHQDKRDDVLIGLKSTALRFGENTKPWLSGFSVAMLGALSLVGVNSGQTAPYYAALGAVGAHLTHQIYTLDIHRPEDCWNKFISNRTLGLIVFLGIVLGNLWKEKKTDKTKKGIENKIEN

SEQ ID NO: 4074 - protein, 307 aa, Homo sapiens
MEPSSLELPADTVQRIAAELKCHPTDERVALHLDEEDKLRHFRECFYIPKIQDLPPVDLSLVNKDENAIYFLGNSLGLQPKMVKTYLEEELDKWAKIAAYGHEVGKRPWITGDESIVGLMKDIVGANEKEIALMNALTVNLHLLMLSFFKPTPKRYKILLEAKAFPSDHYAIESQLQLHGLNIEESMRMIKPREGEETLRIEDILEVIEKEGDSIAVILFSGVHFYTGQHFNIPAITKAGQAKGCYVGFDLAHAVGNVELYLHDWGVDFACWCSYKYLNAGAGGIAGAFIHEKHAHTIKPARSEFFN

SEQ ID NO: 4075 - protein, 465 aa, Homo sapiens
MEPSSLELPADTVQRIAAELKCHPTDERVALHLDEEDKLRHFRECFYIPKIQDLPPVDLSLVNKDENAIYFLGNSLGLQPKMVKTYLEEELDKWAKIAAYGHEVGKRPWITGDESIVGLMKDIVGANEKEIALMNALTVNLHLLMLSFFKPTPKRYKILLEAKAFPSDHYAIESQLQLHGLNIEESMRMIKPREGEETLRIEDILEVIEKEGDSIAVILFSGVHFYTGQHFNIPAITKAGQAKGCYVGFDLAHAVGNVELYLHDWGVDFACWCSYKYLNAGAGGIAGAFIHEKHAHTIKPALVGWFGHELSTRFKMDNKLQLIPGVCGFRISNPPILLVCSLHASLEIFKQATMKALRKKSVLLTGYLEYLIKHNYGKDKAATKKPVVNIITPSHVEERGCQLTITFSVPNKDVFQELEKRGVVCDKRNPNGIRVAPVPLYNSFHDVYKFTNLLTSILDSAETKN

SEQ ID NO: 4076 - protein, 416 aa, Homo sapiens
MVRPRRAPYRSGAGGPLGGRGRPPRPLVVRAVRSRSWPASPRGPQPPRIRARSAPPMEGARVFGALGPIGPSSPGLTLGGLAVSEHRLSNKLLAWSGVLEWQEKRRPYSDSTAKLKRTLPCQAYVNQGENLETDQWPQKLIMQLIPQQLLTTLGPLFRNSQLAQFHFTNRDCDSLKGLCRIMGNGFAGCMLFPHISPCEVRVLMLLYSSKKKIFMGLIPYDQSGFVSAIRQVITTRKQAVGPGGVNSGPVQIVNNKFLAWSGVMEWQEPRPEPNSRSKRWLPSHVYVNQGEILRTEQWPRKLYMQLIPQQLLTTLVPLFRNSRLVQFHFTKDLETLKSLCRIMDNGFAGCVHFSYKASCEIRVLMLLYSSEKKIFIGLIPHDQGNFVNGIRRVIANQQQVLQRNLEQEQQQRGMGG

SEQ ID NO: 4077 - protein, 533 aa, Homo sapiens
MAHGSVTFRDVAIDFSQEEWEFLDPAQRDLYRDVMWENYSNFISLGPSISKPDVITLLDEERKEPGMVVREGTRRYCPDLESRYRTNTLSPEKDIYEIYSFQWDIMERIKSYSLQGSIFRNDWECKSKIEGEKEQQEGYFGQVKITSEKMTTYKRHNFLTEYQIVHNGEKVYECKECRKTFIRRSTLSQHLRIHTGEKPYKCKECGQAFRQRAHLIRHHKLHTGEKPYECKECGKAFTVLQELTQHQRLHTGEKPYECKECGKAFRVHQQLARHQRIHTGEKPYECKDCGKTFRQCTHLTRHQRLHTAEKLYECKECGKAFVCGPDLRVHQKIHFGEKPYECKECGKAFRICQQLTVHQSIHTGEKPYECKECGKTFRLRQQLVRHQRIHTREKPYECMECWKTFSSYSQLISHQSIHIGERPYECEECGKAFRLLSQLTQHQSIHTGEKPYECKECRKPFRLLSQLTQHQSIHTGEKPYECKECGKAFRLYSFLTQHQRIHTGEKPYKCKECKKAFRQHSHLTQHQKIHNGI

SEQ ID NO: 4078 - protein, 650 aa, Homo sapiens
MAEGTAEAPLENGGGGDSGAGALERGVAPIKRQYLTTKEQFHQFLEAKGQEKTCRETEVGDPAGNELAEPEAKRIRLEDGQTADGQTEEAAEPGEQLQTQKRARGQNKGRPHVKPTNYDKNRLCPSLIQESAAKCFFGDRCRFLHDVGRYLETKPADLGPRCVLFETFGRCPYGVTCRFAGAHLGPEGQNLVQEELAARGTQPPSIRNGLDKALQQQLRKREVRFERAEQALRRFSQGPTPAAAVPEGTAAEGAPRQENCGAQQVPAGPGTSTPPSSPVRTCGPLTDEDVVRLRPCEKKRLDIRGKLYLAPLTTCGNLPFRRICKRFGADVTCGEMAVCTNLLQGQMSEWALLKRHQCEDIFGVQLEGAFPDTMTKCAELLSRTVEVDFVDINVGCPIDLVYKKGGGCALMNRSTKFQQIVRGMNQVLDVPLTVKIRTGVQERVNLAHRLLPELRDWGVALVTLHGRSREQRYTKLADWQYIEECVQAASPMPLFGNGDILSFEDANRAMQTGVTGIMIARGALLKPWLFTEIKEQRHWDISSSERLDILRDFTNYGLEHWGSDTQGVEKTRRFLLEWLSFLCRYVPVGLLERLPQRINERPPYYLGRDYLETLMASQKAADWIRISEMLLGPVPPSFAFLPKHKANAYK

SEQ ID NO: 4079 - protein, 404 aa, Homo sapiens
MEAGEEPLLLAELKPGRPHQFDWKSSCETWSVAFSPDGSWFAWSQGHCIVKLIPWPLEEQFIPKGFEAKSRSSKNETKGRGSPKEKTLDCGQIVWGLAFSPWPSPPSRKLWARHHPQVPDVSCLVLATGLNDGQIKIWEVQTGLLLLNLSGHQDVVRDLSFTPSGSLILVSASRDKTLRIWDLNKHGKQIQVLSGHLQWVYCCSISPDCSMLCSAAGEKSVFLWSMRSYTLIRKLEGHQSSVVSCDFSPDSALLVTASYDTNVIMWDPYTGERLRSLHHTQVDPAMDDSDVHISSLRSVCFSPEGLYLATVADDRLLRIWALELKTPIAFAPMTNGLCCTFFPHGGVIATGTRDGHVQFWTAPRVLSSLKHLCRKALRSFLTTYQVLALPIPKKMKEFLTYRTF

SEQ ID NO: 4080 - protein, 263 aa, Homo sapiens
MFRNQYDNDVTVWSPQGRIHQIEYAMEAVKQGSATVGLKSKTHAVLVALKRAQSELAAHQKKILHVDNHIGISIAGLTADARLLCNFMRQECLDSRFVFDRPLPVSRLVSLIGSKTQIPTQRYGRRPYGVGLLIAGYDDMGPHIFQTCPSANYFDCRAMSIGARSQSARTYLERHMSEFMECNLNELVKHGLRALRETLPAEQDLTTKNVSIGIVGKDLEFTIYDDDDVSPFLEGLEERPQRKAQPAQPADEPAEKADEPMEH

SEQ ID NO: 4081 - protein, 269 aa, Homo sapiens
MQLSKVKFRNQYDNDVTVWSPQGRIHQIEYAMEAVKQGSATVGLKSKTHAVLVALKRAQSELAAHQKKILHVDNHIGISIAGLTADARLLCNFMRQECLDSRFVFDRPLPVSRLVSLIGSKTQIPTQRYGRRPYGVGLLIAGYDDMGPHIFQTCPSANYFDCRAMSIGARSQSARTYLERHMSEFMECNLNELVKHGLRALRETLPAEQDLTTKNVSIGIVGKDLEFTIYDDDDVSPFLEGLEERPQRKAQPAQPADEPAEKADEPMEH

SEQ ID NO: 4082 - protein, 200 aa, Homo sapiens [sequence omitted]

SEQ ID NO: 4083 - protein, 538 aa, Homo sapiens
MSFSATILFSPPSGSEARCCCCACKSETNGGNTGSQGGNPPPSTPITVTGHGLAVQSSEQLLHVIYQRVDKAVGLAEAALGLARANNELLKRLQEEVGDLRQGKVSIPDEDGESRAHSSPPEEPGPLKESPGEAFKALSAVEEECDSVGSGVQVVIEELRQLGAASVGPGPLGFPATQRDMRLPGCTLAASEAAPLLNPLVDDYVASEGAVQRVLVPAYAKQLSPATQLAIQRATPETGPENGTKLPPPRPEDMLNAAAALDSALEESGPGSTGELRHSLGLTVSPCRTRGSGQKNSRRKRDLVLSKLVHNVHNHITNDKRFNGSESIKSSWNISVVKFLLEKLKQELVTSPHNYTDKELKGACVAYFLTKRREYRNSLNPFKGLKEKEEKKLRSRRYRLFANRSSIMRHFGPEDQRLWNDVTEELMSDEEDSLNEPSVWVARPPRFRAQRLTELCYHLDANSKHGTKANRVYGPPSDRLPSAEAQLLPPELYNPNFQEEEDEGGDENAPGSPSFDQPHKTCCPDLNSFIEIKVEKDE

SEQ ID NO: 4084 - protein, 203 aa, Homo sapiens
MSSDFEGYEQDFAVLTAEITSKIARVPRLPPDEKKQMVANVEKQLEEAKELLEQMDLEVREIPPQSRGMYSNRMRSYKQEMGKLETDFKRSRIAYSDEVRNELLGDDGNSSENQRAHLLDNTERLERSSRRLEAGYQIAVETEQIGQEMLENLSHDREKIQRARERLRETDANLGKSSRILTGMLRRGCSVKKQCNLSLAPKA

SEQ ID NO: 4085 - protein, 312 aa, Homo sapiens
MESALPAAGFLYWVGAGTVAYLALRISYSLFTALRVWGVGNEAGVGPGLGEWAVVTGSTDGIGKSYAEELAKHGMKVVLISRSKDKLDQVSSEIKEKFKVETRTIAVDFASEDIYDKIKTGLAGLEIGILVNNVGMSYEYPEYFLDVPDLDNVIKKMININILSVCKMTQLVLPGMVERSKGAILNISSGSGMLPVPLLTIYSATKTFVDFFSQCLHEEYRSKGVFVQSVLPYFVATKLAKIRKPTLDKPSPETFVKSAIKTVGLQSRTNGYLIHALMGSIISNLPSWIYLKIVMNMNKSTRAHYLKKTKKN

SEQ ID NO: 4086 - protein, 940 aa, Homo sapiens
MARKRAAGGEPRGRELRSQKSKAKSKARREEEEEDAFEDEKPPKKSLLSKVSQGKRKRGCSHPGGSADGPAKKKVAKVTVKSENLKVIKDEALSDGDDLRDFPSDLKKAHHLKRGATMNEDSNEEEEESENDWEEVEELSEPVLGDVRESTAFSRSLLPVKPVEIEIETPEQAKTRERSEKIKLEFETYLRRAMKRFNKGVHEDTHKVHLLCLLANGFYRNNICSQPDLHAIGLSIIPARFTRVLPRDVDTYYLSNLVKWFIGTFTVNAELSASEQDNLQTTLERRFAIYSARDDEELVHIFLLILRALQLLTRLVLSLQPIPLKSATAKGKKPSKERLTADPGGSSETSSQVLENHTKPKTSKGTKQEETFAKGTCRPSAKGKRNKGGRKKRSKPSSSEEDEGPGDKQEKATQRRPHGRERRVASRVSYKEESGSDEAGSGSDFELSSGEASDPSDEDSEPGPPKQRKAPAPQRTKAGSKSASRTHRGSHRKDPSLPAASSSSSSSKRGKKMCSDGEKAEKRSIAGIDQWLEVFCEQEEKWVCVDCVHGVVGQPLTCYKYATKPMTYVVGIDSDGWVRDVTQRYDPVWMTVTRKCRVDAEWWAETLRPYQSPFMDREKKEDLEFQAKHMDQPLPTAIGLYKNHPLYALKRHLLKYEAIYPETAAILGYCRGEAVYSRDCVHTLHSRDTWLKKARVVRLGEVPYKMVKGFSNRARKARLAEPQLREENDLGLFGYWQTEEYQPPVAVDGKVPRNEFGNVYLFLPSMMPIGCVQLNLPNLHRVARKLDIDCVQAITGFDFHGGYSHPVTDGYIVCEEFKDVLLTAWENEQAVIERKEKEKKEKRALGNWKLLAKGLLIRERLKRRYGPKSEAAAPHTDAGGGLSSDEEEGTSSQAEAARILAASWPQNREDEEKQKLKGGPKKTKREKKAAASHLFPFEKL

SEQ ID NO: 4087 - protein, 376 aa, Homo sapiens
MKGEDAQPQEMASTSFPRASGPSPEFRQHGDSDGKRGSPQNLPIEHHFACKECGDTFRLKVLLVQHQRVHSEEKGWECGDCGKVFRGVAEFNEHRKSHVAAEPQPGPSRALENAAEKREQMEREAKPFECEECGKRFKKNAGLSQHLRVHSREKPFDCEECGRSFKVNTHLFRHQKLHTSEKPFACKACSRDFLDRQELLKHQRMHTGHLPFDCDDCGKSFRGVNGLAEHQRIHSGAKPYGCPHCGKLFRRSSELTKHRRIHTGEKPYACGQCGKAFRQSSSLLEHARIHSGERPYACGECGKAFRGPSDLIKHRRIHSGLKPYECDKCGKAFRRSSGLSRHRRIHSGARRCECSQCGRVFKRRSALQKHQPTHHE

SEQ ID NO: 4088 - protein, 376 aa, Homo sapiens; identical to SEQ ID NO: 4087

SEQ ID NO: 4089 - protein, 376 aa, Homo sapiens; identical to SEQ ID NO: 4087

SEQ ID NO: 4090 - protein, 376 aa, Homo sapiens; identical to SEQ ID NO: 4087

SEQ ID NO: 4091 - protein, 328 aa, Homo sapiens
MSHPCVSLLGVPVLNPALVPHLAQGQVLLVSDPSPNTDPAKYSESTSATRHQMKGEDAQPQEMASTSFPRASGPSPEFRQHGDSDGKRGSPQNLPIEHHFACKECGDTFRLKVLLVQHQRVHSEEKGWECGDCGKVFRGVAEFNEHRKSHVAAEPQPGPSRALENAAEKREQMEREAKPFECEECGKRFKKNAGLSQHLRVHSREKPFDCEECGRSFKVNTHLFRHQKLHTSEKPFACKACSRDFLDRQELLKHQRMHTGHLPFDCDDCGKSFRGVNGLAEHQRIHSGAKPYGCPHCGKLFRRSSELTKHRRIHTGEKPYACGLPWAL

SEQ ID NO: 4092 - protein, 376 aa, Homo sapiens; identical to SEQ ID NO: 4087

SEQ ID NO: 4093 - protein, 376 aa, Homo sapiens; identical to SEQ ID NO: 4087

SEQ ID NO: 4094 - protein, 376 aa, Homo sapiens; identical to SEQ ID NO: 4087

SEQ ID NO: 4095 - protein, 328 aa, Homo sapiens; identical to SEQ ID NO: 4091

SEQ ID NO: 4096 - protein, 376 aa, Homo sapiens; identical to SEQ ID NO: 4087

SEQ ID NO: 4097 - protein, 581 aa, Homo sapiens
MVLKAFFPTCCVSTDSGLLVGRWVPEQSSAVVLAVLHFPFIPIQVKQLLAQVRQASQVGVAVLGTWCHCRQEPEESLGRFLESLGAVFPHEPWLRLCRERGGTFWSCEATHRQAPTAPGAPGEDQVMLIFYDQRQVLLSQLHLPTVLPDRQAGATTASTGGLAAVFDTVARSEVLFRSDRFDEGPVRLSHWQSEGVEASILAELARRASGPICLLLASLLSLVSAVSACRVFKLWPLSFLGSKLSTCEQLRHRLEHLTLIFSTRKAENPAQLMRKANTVASVLLDVALGLMLLSWLHGRSRIGHLADALVPVADHVAEELQHLLQWLMGAPAGLKMNRALDQVLGRFFLYHIHLWISYIHLMSPFVEHILWHVGLSACLGLTVALSLLSDIIALLTFHIYCFYVYGARLYCLKIHGLSSLWRLFRGKKWNVLRQRVDSCSYDLDQLFIGTLLFTILLFLLPTTALYYLVFTLLRLLVVAVQGLIHLLVDLINSLPLYSLGLRLCRPYRLAAGVKFRVLRHEAGRPLRLLMQINPLPYSRVVHTYRLPSCGCHPKHSWGALCRKLFLGELIYPWRQRGDKQD

SEQ ID NO: 4098 - protein, 760 aa, Homo sapiens
MVLKAFFPTCCVSTDSGLLVGRWVPEQSSAVVLAVLHFPFIPIQVKQLLAQVRQASQVGVAVLGTWCHCRQEPEESLGRFLESLGAVFPHEPWLRLCRERGGTFWSCEATHRQAPTAPGAPGEDQVMLIFYDQRQVLLSQLHLPTVLPDRQAGATTASTGGLAAVFDTVARSEVLFRSDRFDEGPVRLSHWQSEGVEASILAELARRASGPICLLLASLLSLVSAVSACRVFKLWPLSFLGSKLSTCEQLRHRLEHLTLIFSTRKAENPAQLMRKANTVASVLLDVALGLMLLSWLHGRSRIGHLADALVPVADHVAEELQHLLQWLMGAPAGLKMNRALDQVLGRFFLYHIHLWISYIHLMSPFVEHILWHVGLSACLGLTVALSLLSDIIALLTFHIYCFYVYGARLYCLKIHGLSSLWRLFRGKKWNVLRQRVDSCSYDLDQLFIGTLLFTILLFLLPTTALYYLVFTLLRLLVVAVQGLIHLLVDLINSLPLYSLGLRLCRPYRLADKPTALQPRGAHLPPPQLWLPPQALLGRPVPQAVPWGAHLPLEAERGQAGLRELLARLAPPHGHSQPSALPGWHQLSWRMSCALWTLLCAPEHGRPCYHTLGLEVIGSEQMWGWPARLAALHHWHCLPWDPLPTCCGHHGGEHSNPRCPEHCPMPTLCTQVQRVRPPQQPQVEGWSPWGLPSGSALAVGVEGPCQDEPPSPRHPLAPSAEQHPASGGLKQSLTPVPSGPGPSLPEPHGVYLRMFPGEVAL

SEQ ID NO: 4099 - protein, 341 aa, Homo sapiens
MTDGILGKAATMEIPIHGNGEARQLPEDDGLEQDLQQVMVSGPNLNETSIVSGGYGGSGDGLIPTGSGRHPSHSTTPSGPGDEVARGIAGEKFDIVKKWGINTYKCTKQLLSERFGRGSRTVDLELELQIELLRETKRKYESVLQLGRALTAHLYSLLQTQHALGDAFADLSQKSPELQEEFGYNAETQKLLCKNGETLLGAVNFFVSSINTLVTKTMEDTLMTVKQYEAARLEYDAYRTDLEELSLGPRDAGTRGRLESAQATFQAHRDKYEKLRGDVAIKLKFLEENKIKVMHKQLLLFHNAVSAYFAGNQKQLEQTLQQFNIKLRPPGAEKPSWLEEQ

SEQ ID NO: 4100 - protein, 528 aa, Homo sapiens
MGAAASRRRALRSEAMSSVAAKVRAARAFGEYLSQSHPENRNGADHLLADAYSGHDGSPEMQPAPQNKRRLSLVSNGCYEGSLSEEPSIRKPAGEGPQPRVYTISGEPALLPSPEAEAIELAVVKGRRQRHPHHHSQPLRASPGGSREDVSRPCQSWAGSRQGSKECPGCAQLAPGPTPRAFGLDQPPLPETSGRRKKLERMYSVDRVSDDIPIRTWFPKENLFSFQTATTTMQAVFRGYAERKRRKRENDSASVIQRNFRKHLRMVGSRRVKAQTFAERRERSFSRSWSDPTPMKADTSHDSRDSSDLQSSHCTLDEAFEDLDWDTEKGLEAVACDTEGFVPPKVMLISSKVPKAEYIPTIIRRDDPSIIPILYDHEHATFEDILEEIERKLNVYHKGAKIWKMLIFCQGGPGHLYLLKNKVATFAKVEKEEDMIHFWKRLSRLMSKVNPEPNVIHIMGCYILGNPNGEKLFQNLRTLMTPYRVTFESPLELSAQGKQMIETYFDFRLYRLWKSRQHSKLLDFDDVL

SEQ ID NO: 4101 - protein, 136 aa, Homo sapiens
MVLLESEQFLTELTRLFQKCRTSGSVYITLKKYDGRTKPIPKKGTVEGFEPADNKCLLRATDGKKKISTVVSSKEVNKFQMAYSNLLRANMDGLKKRDKKNKTKKTKAAAAAAAAAPAAAATAATTAAATAATAAQ

SEQ ID NO: 4102 - protein, 570 aa, Homo sapiens
MALKKSSPSLDSGDSDSEELPTFAFLKKEPSSTKRRQPEREEKIVVVDISDCEASCPPAPELFSPPVPDIAETVTQTQPVRLLSSESEDEEEFIPLAQRLTCKFLTHKQLSPEDSSSPVKSVLDHQNNEGASCDWKKPFPKIPEVPLHDTPERSAADNKDLILDPCCQLPAYLSTCPGQSSSLAVTKTNSDILPPQKKTKPSQKVQGRGSHGCQQQRQARQKESTLRRQERKNAALVTRMKAQRPEECLKHIIVVLDPVLLQMEGGGQLLGALQTMECRCVIEAQAVPCSVTWRRRAGPSEDREDWVEEPTVLVLLRAEAFVSMIDNGKQGSLDSTMKGKETLQGFVTDITAKTAGKALSLVIVDQEKCFSAQNPPRRGKQGANKQTKKQQQRQPEASIGSMVSRVDAEEALVDLQLHTEAQAQIVQSWKELADFTCAFTKAVAEAPFKKLRDETTFSFCLESDWAGGVKVDLAGRGLALVWRRQIQQLNRVSLEMASAVVNAYPSPQLLVQAYQQCFSDKERQNLLADIQVRRGEGVTSTSRRIGPELSRRIYLQMTTLQPHLSLDSAD

SEQ ID NO: 4103 - protein, 406 aa, Homo sapiens
MHPAVFLSLPDLRCSLLLLVTWVFTPVTTEITSLDTENIDEILNNADVALVNFYADWCRFSQMLHPIFEEASDVIKEEFPNENQVVFARVDCDQHSDIAQRYRISKYPTLKLFRNGMMMKREYRGQRSVKALADYIRQQKSDPIQEIRDLAEITTLDRSKRNIIGYFEQKDSDNYRVFERVANILHDDCAFLSAFGDVSKPERYSGDNIIYKPPGHSAPDMVYLGAMTNFDVTYNWIQDKCVPLVREITFENGEELTEEGLPFLILFHMKEDTESLEIFQNEVARQLISEKGTINFLHADCDKFRHPLLHIQKTPADCPVIAIDSFRHMYVFGDFKDVLIPGKLKQFVFDLHSGKLHREFHHGPDPTDTAPGEQAQDVASSPPESSFQKLAPSEYRYTLLRDRDEL

SEQ ID NO: 4104 - protein, 350 aa, Homo sapiens
MAMRQTPLTCSGHTRPVVDLAFSGITPYGYFLISACKDGKPMLRQGDTGDWIGTFLGHKGAVWGATLNKDATKAATAAADFTAKVWDAVSGDELMTLAHKHIVKTVDFTQDSNYLLTGGQDKLLRIYDLNKPEAEPKEISGHTSGIKKALWCSEDKQILSADDKTVRLWDHATMTEVKSLNFNMSVSSMEYIPEGEILVITYGRSIAFHSAVSLDPIKSFEAPATINSASLHPEKEFLVAGGEDFKLYKYDYNSGEELESYKGHFGPIHCVRFSPDGELYASGSEDGTLRLWQTVVGKTYGLWKCVLPEEDSGELAKPKIGFPETTEEELEEIASENSECIFPSAPDVKA

SEQ ID NO: 4105 - protein, 145 aa, Homo sapiens
MAKSLLKTASLSGRTKLLHQTGLSLYSTSHGFYEEEVKKTLQQFPGGSIDLQKEDNGIGILTLNNPSRMNAFSGVMMLQLLEKVIELENWTEGKGLIVRGAKNTFSSGSDLNAVKSLGTPETSFNKCCAGSRLGIGWRSRIYYSM

SEQ ID NO: 4106 - protein, 659 aa, Homo sapiens
MALVTVSRSPPGSGASTPVGPWDQAVQRRSRLQRRQSFAVLRGAVLGLQDGGDNDDAAEASSEPTEKAPSEEELHGDQTDFGQGSQSPQKQEEQRQHLHLMVQLLRPQDDIRLAAQLEAPRPPRLRYLLVVSTREGEGLSQDETVLLGVDFPDSSSPSCTLGLVLPLWSDTQVYLDGDGGFSVTSGGQSRIFKPISIQTMWATLQVLHQACEAALGSGLVPGGSALTWASHYQERLNSEQSCLNEWTAMADLESLRPPSAEPGGSSEQEQMEQAIRAELWKVLDVSDLESVTSKEIRQALELRLGLPLQQYRDFIDNQMLLLVAQRDRASRIFPHLYLGSEWNAANLEELQRNRVTHILNMAREIDNFYPERFTYHNVRLWDEESAQLLPHWKETHRFIEAARAQGTHVLVHCKMGVSRSAATVLAYAMKQYECSLEQALRHVQELRPIARPNPGFLRQLQIYQGILTASRQSHVWEQKVGGVSPEEHPAPEVSTPFPPLPPEPEGGGEEKVVGMEESQAAPKEEPGPRPRINLRGVMRSISLLEPSLELESTSETSDMPEVFSSHESSHEEPLQPFPQLARTKGGQQVDRGPQPALKSRQSVVTLQGSAVVANRTQAFQEQEQGQGQGQGEPCISSTPRSRKVVRQASVHDSGEEGEA

SEQ ID NO: 4107 - protein, 471 aa, Homo sapiens
MALVTVSRSPPGSGASTPVGPWDQAVQRRSRLQRRQSFAVLRGAVLGLQDGGDNDDAVEASSEPTEKAPSEEELHGDQTDFGQGSQSPQKQEEQRQHLHLMVQLLRPQDDIRLAAQLEAPRPPRLRYLLVVSTREGEGLSQDETVLLGVDFPDSSSPSCTLGLVLPLWSDTQVYLDGDGGFSVTSGGQSRIFKPISIQTMWATLQVLHQACEAALGSGLVPGGSALTWASHYQERLNSEQSCLNEWTAMADLESLRPPSAEPGGSSEQEQMEQAIRAELWKVLDVSDLESVTSKEIRQALELRLGLPLQQYRDFIDNQMLLLVAQRDRASRIFPHLYLGSEWNAANLEELQRNRVTHILNMAREIDNFYPERFTYHNVRLWDEESAQLLPHWKETHRFIEAARAQGTHVLVHCKMGVSRSAATVLAYAMKQYECSLEQALRHVQELRPIARPNPGFLRQLQIYQGILTART

SEQ ID NO: 4108 - protein, 492 aa, Homo sapiens
MPSFLVPSLVSSPVLLKLLFSPGPKTIWSLWQQPMLFQEATAFENMTKDWNYLEGSQKDCYRDTMLDSYENTVPQGSFLQLSMMPQRAGNDPPGVSNASEMEMEISNMREKFLMSVTKLVESKSYNSKVFSKEKYFQTIKEVKEAKEKGKKSSRDYRRAAKYDVISVQGTEKLIEATHGERDRIRYYVHKEELFDILHDTHLSIGHGGRTRMLKELQGKYGNVTKEVIVLYLTLCKQCHQKNPVPKRGLAPKPMTFKDIDSTCQVEILDMQSSADGEFKFILYYQDHSTKFIILRPLRTKQAHEVVSVLLDIFTILGTPSVLDSDSGVEFTNQVVHELNELWPDLKIVSGKYHPGQSQGSLEGASRDVKNMISTWMQSNHSCHWAKGLRFMQMVRNQAFDVSLQQSPFEAMFGYKAKFGLYSSNLPRETVATLQTEEELEIAEEQLENSLWIRQEERAEIGADRSDMDDDMDPTPEASEPSTSQGTSGLLCW

SEQ ID NO: 4109 - protein, 580 aa, Homo sapiens
MFAGLQDLGVANGEDLKETLTNCTEPLKAIEQFQTENGVLLPSLQSALPFLDLHGTPRLEFHQSVFDELRDKLLERVSAIASEGKAEERYKKLEDLLEKSFSLVKMPSLQPVVMCVMKHLPKVPEKKLKLVMADKELYRACAVEVKRQIWQDNQALFGDEVSPLLKQYILEKESALFSTELSVLHNFFSPSPKTRRQGEVVQRLTRMVGKNVKLYDMVLQFLRTLFLRTRNVHYCTLRAELLMSLHDLDVGEICTVDPCHKFTWCLDACIRERFVDSKRARELQGFLDGVKKGQEQVLGDLSMILCDPFAINTLALSTVRHLQELVGQETLPRDSPDLLLLLRLLALGQGAWDMIDSQVFKEPKMEVELITRFLPMLMSFLVDDYTFNVDQKLPAEEKAPVSYPNTLPESFTKFLQEQRMACEVGLYYVLHITKQRNKNALLRLLPGLVETFGDLAFGDIFLHLLTGNLALLADEFALEDFCSSLFDGFFLTASPRKENVHRHALRLLIHLHPRVAPSKLEALQKALEPTGQSGEAVKELYSQLGEKLEQLDHRKPSPAQAAETPALELPLPSVPAPAPL

SEQ ID NO: 4110 - protein, 240 aa, Homo sapiens
MEESVVRPSVFVVDGQTDIPFTRLGRSHRRQSCSVARVGLGLLLLLMGAGLAVQGWFLLQLHWRLGEMVTRLPDGPAGSWEQLIQERRSHEVNPAAHLTGANSSLTGSGGPLLWETQLGLAFLRGLSYHDGALVVTKAGYYYIYSKVQLGGVGCPLGLASTITHGLYKRTPRYPEELELLVSQQSPCGRATSSSRVWWDSSFLGGVVHLEAGEKVVVRVLDERLVRLRDGTRSYFGAFMV

SEQ ID NO: 4111 - protein, 204 aa, Homo sapiens
MEESVVRPSVFVVDGQTDIPFTRLGRSHRRQSCSVARDGPAGSWEQLIQERRSHEVNPAAHLTGANSSLTGSGGPLLWETQLGLAFLRGLSYHDGALVVTKAGYYYIYSKVQLGGVGCPLGLASTITHGLYKRTPRYPEELELLVSQQSPCGRATSSSRVWWDSSFLGGVVHLEAGEEVVVRVLDERLVRLRDGTRSYFGAFMV

SEQ ID NO: 4112 - protein, 300 aa, Homo sapiens [sequence omitted]

SEQ ID NO: 4113 - protein, 246 aa, Homo sapiens
MLHNASLLIDDIEDNSKLRRGFPVAHSIYGIPSVINSANYVYFLGLEKVLTLDHPDAVKLFTRQLLELHQGQGLDIYWRDNYTCPTEEEYKAMVLQKTGGLFGLAVGLMQLFSDYKEDLKPLLNTLGLFFQIRDDYANLHSKEYSENKSFCEDLTEGKFSFPTIHAIWSRPESTQVQNILRQRTENIDIKKYCVHYLEDVGSFEYTRNTLKELEAKAYKQIDARGGNPELVALVKHLSKMFKEENE

SEQ ID NO: 4114 - protein, 300 aa, Homo sapiens [sequence omitted]

SEQ ID NO: 4115 - protein, 6620 aa, Homo sapiens
MDQPQFSGAPRFLTRPKAFVVSVGKDATLSCQIVGNPTPQVSWEKDQQPVAAGARFRLAQDGDLYRLTILDLALGDSGQYVCRARNAIGEAFAAVGLQVDAEAACAEQAPHFLLRPTSIRVREGSEATFRCRVGGSPRPAVSWSKDGRRLGEPDGPRVRVEELGEASALRIRAARPRDGGTYEVRAENPLGAASAAAALVVDSDAADTASRPGTSTAALLAHLQRRREAMRAEGAPASPPSTGTRTCTVTEGKHARLSCYVTGEPKPETVWKKDGQLVTEGRRHVVYEDAQENFVLKILFCKQSDRGLYTCTASNLVGQTYSSVLVVVREPAVPFKKRLQDLEVREKESATFLCEVPQPSTEAAWFKEETRLWASAKYGIEEEGTERRLTVRNVSADDDAVYICETPEGSRTVAELAVQGNLLRKLPRKTAVRVGDTAMFCVELAVPVGPVHWLRNQEEVVAGGRVAISAEGTRHTLTISQCCLEDVGQVAFMAGDCQTSTQFCVSAPRKPPLQPPVDPVVKARMESSVILSWSPPPHGERPVTIDGYLVEKKKLGTYTWIRCHEAEWVATPELTVADVAEEGNFQFRVSALNSFGQSPYLEFPGTVHLAPKLAVRTPLKAVQAVEGGEVTFSVDLTVASAGEWFLDGQALKASSVYEIHCDRTRHTLTIREVPASLHGAQLKFVANGIESSIRMEVRAAPGLTANKPPAAAAREVLARLHEEAQLLAELSDQAAAVTWLKDGRTLSPGPKYEVQASAGRRVLLVRDVARDDAGLYECVSRGGRIAYQLSVQGLARFLHKDMAGSCVDAVAGGPAQFECETSEAHVHVHWYKDGMELGHSGERFLQEDVGTRHRLVAATVTRQDEGTYSCRVGEDSVDFRLRVSEPKVVFAKEQLARRKLQAEAGASATLSCEVAQAQTEVTWYKDGKKLSSSSKVCMEATGCTRRLVVQQAGQADAGEYSCEAGGQRLSFHLDVKEPKVVFAKDQVAHSEVQAEAGASATLSCEVAQAQTEVMWYKDGKKLSSSLKVHVEAKGCRRRLVVQQAGKTDAGDYSCEARGQRVSFRLHITEPKMMFAKEQSVHNEVQAEAGASAMLSCEVAQAQTEVTWYKDGKKLSSSSKVGMEVKGCTRRLVLPQAGKADAGEYSCEAGGQRVSFHLHITEPKGVFAKEQSVHNEVQAEAGTTAMLSCEVAQPQTEVTWYKDGKKLSSSSKVRMEVKGCTRRLVVQQVGKADAGEYSCEAGGQRVSFQLHITEPKAVFAKEQLVHNEVRTEAGASATLSCEVAQAQTEVTWYKDGKKLSSSSKVRIEAAGCMRQLVVQQAGQADAGEYTCEAGGQRLSFHLDVSEPKAVFAKEQLAHRKVQAEAGAIATLSCEVAQAQTEVTWYKDGKKLSSSSKVRMEAVGCTRRLVVQQACQADTGEYSCEAGGQRLSFSLDVAEPKVVFAKEQPVHREVQAQAGASTTLSCEVAQAQTEVMWYKDGKKLSFSSKVRMEAVGCTRRLVVQQAGQAVAGEYSCEAGSQRLSFHLHVAEPKAVFAKEQPASREVQAEAGTSATLSCEVAQAQTEVTWYKDGKKLSSSSKVRMEAVGCTRRLVVQEAGQADAGEYSCKAGDQRLSFHLHVAEPKVVFAKEQPAHREVQAEAGASATLSCEVAQAQTEVTWYKDGKKLSSSSKVRVEAVGCTRRLVVQQAGQADAGEYSCEAGGQRLSFRLHVAELEPQISERPCRREPLVVKEHEDIILTATLATPSAATVTWLKDGVEIRRSKRHETASQGDTHTLTVHGAQVLDSAIYSCRVGAEGQDFPVQVEEVAAKFCRLLEPVCGELGGTVTLACELSPACAEVVWRCGNTQLRVGKRFQMVAEGPVRSLTVLGLRAEDAGEYVCESRDDHTSAQLTVSVPRVVKFMSGLSTVVAEEGGEATFQCVVSPSDVAVVWFRDGALLQPSEKFAISQSGASHSLTISDLVLEDAGQITVEAEGASSSAALRVREAPVLFKKKLEPQTVEERSSVTLEVELTRPWPELRWTRNATALAPGKNVEIHAEGARHRLVLHNVGFADRGFFGCETPDDKTQAKLTVEMRQVRLVRGLQAVEAREQGTATMEVQLSHADVDGSWTRDGLRFQQGPTCHLAVRGPMHTLTLSGLRPEDSGLMVFKAEGVHTSARLVVTELPVSFSRPLQDVVTTEKEKVTLECELSRPNVDVRWLKDGVELRAGKTMAIAAQGACRSLTIYRCEFADQGVYVCDAHDAQSSASVKVQGRTYTLIYRRVLAEDAGEIQFVAENAESRAQLRVKELPVTLVRPLRDKIAMEKHRGVLECQVSRASAQVRWFKGSQELQPGPKYELVSDGLYRKLIISDVHAEDEDTYTCDAGDVKTSAQFFVEEQSITIVRGLQDVTVMEPAPAWFECETSIPSVRPPKWLLGKTVLQAGGNVGLEQEGTVHRLMLRRTCSTMTGPVHFTVGKSRSSARLVVSDIPVVLTRPLEPKTGRELQSVVLSCDFRPAPKAVQWYKDDTPLSPSEKFKMSLEGQMAELRILRLMPADAGVYRCQAGSAHSSTEVTVEAREVTVTGPLQDAEATEEGWASFSCELSHEDEEVEWSLNGMPLYNDSFHEISHKGRRHTLVLKSIQRADAGIVRASSLKVSTSARLEVRVKPVVFLKALDDLSAEERGTLALQCEVSDPEAHVVWRKDGVQLGPSDKYDFLHTAGTRGLVVHDVSPEDAGLYTCHVGSEETRARVRVHDLHVGITKRLKTMEVLEGESCSFECVLSHESASDPAMWTVGGKTVGSSSRFQATRQGRKYILVVREAAPSDAGEVVFSVRGLTSKASLIVRERPAAIIKPLEDQWVAPGEDVELRCELSRAGTPVHWLKDRKAIRKSQKYDVVCEGTMAMLVIRGASLKDAGEYTCEVEASKSTASLHVEEKANCFTEELTNLQVEEKGTAVFTCKTEHPAATVTWRKGLLELRASGKHQPSQEGLTLRLTISALEKADSDTYTCDIGQAQSRAQLLVQGRRVHIIEDLEDVDVQEGSSATFRCRISPANYEPVHWFLDKTPLHANELNEIDAQPGGYHVLTLRQLALKDSGTIYFEAGDQRASAALRVTEKPSVFSRELTDATITEGEDLTLVCETSTCDIPVCWTKDGKTLRGSARCQLSHEGHRAQLLITGATLQDSGRYKCEAGGACSSSIVRVHARPVRFQEALKDLEVLEGGAATLRCVLSSVAAPVKWCYGNNVLRPGDKYSLRQEGAMLELVVRNLRPQDSGRYSCSFGDQTTSATLTVTALPAQFIGKLRNKEATEGATATLRCELSKAAPVEWRKGSETLRDGDRYCLRQDGAMCELQIRGLAMVDAAEYSCVCGEERTSASLTIRPMPAHFIGRLRHQESIEGATATLRCELSKAAPVEWRKGRESLRDGDRHSLRQDGAVCELQICGLAVADAGEYSCVCGEERTSATLTVKALPAKFTEGLRNEEAVEGATAMLWCELSKVAPVEWRKGPENLRDGDRYILRQEGTRCELQICGLAMADAGEYLCVCGQERTSATLTIRALPARFIEDVKNQEAREGATAVLQCELNSAAPVEWRKGSETLRDGDRYSLRQDGTKCELQIRGLAMADTGEYSCVCGQERTSAMLTVRALPIKFTEGLRNEEATEGATAVLRCELSKMAPVEWWKGHETLRDGDRHSLRQDGARCELQIRGLVAEDAGEYLCMCGKERTSAMLTVRAMPSKFIEGLRNEEATEGDTATLWCELSKAAPVEWRKGHETLRDGDRHSLRQDGSRCELQIRGLAVVDAGEYSCVCGQERTSATLTVRALPARFIEDVKNQEAREGATAVLQCELSKAAPVEWRKGSETLRGGDRYSLRQDGTRCELQIHGLSVADTGEYSCVCGQERTSATLTVRAPQPVFREPLQSLQAEEGSTATLQCELSEPTATVVWSKGGLQLQANGRREPRLQGCTAELVLQDLQREDTGEYTCTCGSQATSATLTVTAAPVRFLRELQHQEVDEGGTAHLCCELSRAGASVEWRKGSLQLFPCAKYQMVQDGAAAELLVRGVEQEDAGDYTCDTGHTQSMASLSVRVPRPKFKTRLQSLEQETGDIARLCCQLSDAESGAVVQWLKEGVELHAGPKYEMRSQGATRELLIHQLEAKDTGEYACVTGGQKTAASLRVTEPEVTIVRGLVDAEVTADEDVEFSCEVSRAGATGVQWCLQGLPLQSNEVTEVAVRDGRIHTLRLKGVTPEDAGTVSFHLGNHASSAQLTVRAPEVTILEPLQDVQLSEGQDASFQCRLSRASGQEARWALGGVPLQANEMNDITVEQGTLHLLTLHKVTLEDAGTVSFHVGTCSSEAQLKVTAKNTVVRGLENVEALEGGEALFECQLSQPEVAAHTWLLDDEPVHTSENAEVVFFENGLRHLLLLKNLRPQDSCRVTFLAGDMVTSAFLTVRGWRLEILEPLKNAAVRAGAQACFTCTLSEAVPVGEASWYINGAAVQPDDSDWTVTADGSHHALLLRSAQPHHAGEVTFACRDAVASARLTVLGLPDPPEDAEVVARSSHTVTLSWAAPMSDGGGGLCGYRVEVKEGATGQWRLCHELVPGPECVVDGLAPGETYRFRVAAVGPVGAGEPVHLPQTVRLAEPPKPVPPQPSAPESRQVAAGEDVSLELEVVAEAGEVIWHKGMERIQPGGRFEVVSQGRQQMLVIKGFTAEDQGEYHCGLAQGSICPAAATFQVALSPASVDEAPQPSLPPEAAQEGDLHLLWEALARKRRMSREPTLDSISELPEEDGRSQRLPQEAEEVAPDLSEGYSTADELARTGDADLSHTSSDDESRAGTPSLVTYLKKAGRPGTSPLASKVGAPAAPSVKPQQQQEPLAAVRPPLGDLSTKDLGDPSMDKAAVKIQAAFKGYKVRKEMKQQEGPMFSHTFGDTEAQVGDALRLECVVASKADVRARWLKDGVELTDGRHHHIDQLGDGTCSLLITGLDRADAGCYTCQVSNKFGQVTHSACVVVSGSESEAESSSGGELDDAFRRAARRLHRLFRTKSPAEVSDEELFLSADEGPAEPEEPADWQTYREDEHFICIRFEALTEARQAVTRFQEMFATLGIGVEIKLVEQGPRRVEMCISKETPAPVVPPEPLPSLLTSDAAPVFLTELQNQEVQDGYPVSFDCVVTGQPMPSVRWFKDGKLLEEDDHYMINEDQQGGHQLIITAVVPADMGVYRCLAENSMGVSSTKAELRVDLTSTDYDTAADATESSSYFSAQGYLSSREQEGTESTTDEGQLPQVVEELRDLQVAPGTRLAKFQLKVKGYPAPRLYWFKDGQPLTASAHIRMTDKKILHTLEIISVTREDSGQYAAYISNAMGAAYSSARLLVRGPDEPEEKPASDVHEQLVPPRMLERFTPKKVKKGSSITFSVKVEGRPVPTVHWLREEAERGVLWIGPDTPGYTVASSAQQHSLVLLDVGRQHQGTYTCIASNAAGQALCSASLHVSGLPKVEEQEKVKEALISTFLQGTTQAISAQGLETASFADLGGQRKEEPLAAKEALGHLSLAEVGTEEFLQKLTSQITEMVSAKITQAKLQVPGGDSDEDSKTPSASPRHGRSRPSSSIQESSSESEDGDARGEIFDIYVVTADYLPLGAEQDAITLREGQYVEVLDAAHPLRWLVRTKPTKSSPSRQGWVSPAYLDRRLKLSPEWGAAEAPEFPGEAVSEDEYKARLSSVIQELLSSEQAFVEELQFLQSHHLQHLERCPHVPIAVAGQKAVIFRNVRDIGRFHSSFLQELQQCDTDDDVAMCFIKNQAAFEQYLEFLVGRVQAESVVVSTAIQEFYKKYAEEALLAGDPSQPPPPPLQHYLEQPVERVQRYQALLKELIRNKARNRQNCALLEQAYAVVSALPQRAENKLHVSLMENYPGTLQALGEPIRQGHFIVWEGAPGARMPWKGHNRHVFLFRNHLVICKPRRDSRTDTVSYVFRNMMKLSSIDLNDQVEGDDRAFEVWQEREDSVRKYLLQARTAIIKSSWVKEICGIQQRLALPVWRPPDFEEELADCTAELGETVKLACRVTGTPKPVISWYKDGKAVQVDPHHILIEDPDGSCALILDSLTGVDSGQYMCFAASAAGNCSTLGKILVQVPPRFVNKVRASPFVEGEDAQFTCTIEGAPYPQIRWYKDGALLTTGNKFQTLSEPRSGLLVLVIRAASKEDLGLYECELVNRLGSARASAELRIQSPMLQAQEQCHREQLVAAVEVTEQETKVPKKTVIIEETITTVVKSPRGQRRSPSKSPSRSPSRCSASPLRPGLLAPDLLYLPGAGQPRRPEAEPGQKPVVPTLYVTEAEAHSPALPGLSGPQPKWVEVEETIEVRVKKMGPQGVSPTTEVPRSSSGHLFTLPGATPGGDPNSNNSNNKLLAQEAWAQGTAMVGVREPLVFRVDARGSVDWAASGMGSLEEEGTMEEAGEEEGEDGDAFVTEESQDTHSLGDRDPKILTHNGRMLTLADLEDYVPGEGETFHCGGPGPGAPDDPPCEVSVIQREIGEPTVGQPVLLSVGHALGPRGPLGLFRPEPRGASPPGPQVRSLEGTSFLLREAPARPVGSAPWTQSFCTRIRRSADSGQSSFTTELSTQTVNFGTVGETVTLHICPDRDGDEAAQP

SEQ ID NO: 4116 - protein, 572 aa, Homo sapiens
MLENYQNLLALGPPLHKPDVISHLERGEEPWSMQREVPRGPCPEWELKAVPSQQQGICKEEPAQEPIMERPLGGAQAWGRQAGALQRSQAAPGRRTCHGLGRPVEEFPLRCPLFAQQRVPEGGPLLDTRKNVQATEGRTKAPARLCAGENASTPSEPEKFPQVRRQRGAGAGEGEFVCGECGKAFRQSSSLTLHRRWHSREKAYKCDECGKAFTWSTNLLEHRRIHTGEKPFFCGECGKAFSCHSSLNVHQRIHTGERPYKCSACEKAFSCSSLLSMHLRVHTGEKPYRCGECGKAFNQRTHLTRHHRIHTGEKPYQCGSCGKAFTCHSSLTVHEKIHSGDKPFKCSDCEKAFNSRSRLTLHQRTHTGEKPFKCADCGKGFSCHAYLLVHRRIHSGEKPFKCNECGKAFSSHAYLIVHRRIHTGEKPFDCSQCWKAFSCHSSLIMHQRIHTGEKPYKCSECGRAFSQNHCLIKHQKIHSGEKSFKCEKCGEMFNWSSHLTEHQRLHSEGKPLAIQFNKHLLSTYYVPGSLLGAGDAGLRDVDPIDALDVAKLLCVVPPRAGRNFSLGSKPRN

SEQ ID NO: 4117 - protein, 654 aa, Homo sapiens
MGCCSSASSAAQSSKREWKPLEDRSCTDIPWLLLFILFCIGMGFICGFSIATGAAARLVSGYDSYGNICGQKNTKLEAIPNSGMDHTQRKYVFFLDPCNLDLINRKIKSVALCVAACPRQELKTLSDVQKFAEINGSALCSYNLKPSEYTTSPKSSVLCPKLPVPASAPIPFFHRCAPVNISCYAKFAEALITFVSDNSVLHRLISGVMTSKEIILGLCLLSLVLSMILMVIIRYISRVLVWILTILVILGSLGGTGVLWWLYAKQRRSPKETVTPEQLQIAEDNLRALLIYAISATVFTVILFLIMLVMRKRVALTIALFHVAGKVFIHLPLLVFQPFWTFFALVLFWVYWIMTLLFLGTTGSPVQNEQGFVEFKISGPLQYMWWYHVVGLIWISEFILACQQMTVAGAVVTYYFTRDKRNLPFTPILASVNRLIRYHLGTVAKGSFIITLVKIPRMILMYIHSQLKGKENACARCVLKSCICCLWCLEKCLNYLNQNAYTATAINSTNFCTSAKDAFVILVENALRVATINTVGDFMLFLGKVLIVCSTGLAGIMLLNYQQDYTVWVLPLIIVCLFAFLVAHCFLSIYEMVVDVLFLCFAIDTKYNDGSPGREFYMDKVLMEFVENSRKAMKEAGKGGVADSRELKPMLKKR

SEQ ID NO: 4118 - protein, 657 aa, Homo sapiens
MGCCSSASSAAQSSKREWKPLEDRSCTDIPWLLLFILFCIGMGFICGFSIATGAAARLVSGYDSYGNICGQKNTKLEAIPNSGMDHTQRKYVFFLDPCNLDLINRKIKSVALCVAACPRQELKTLSDVQKFAEINGSALCSYNLKPSEYTTSPKSSVLCPKLPVPASAPIPFFHRCAPVNISCYAKFAEALITFVSDNSVLHRLISGVMTSKEIILGLCLLSLVLSMILMVIIRYISRVLVWILTILVILGSLGGTGVLWWLYAKQRRSPKETVTPEQLQIAEDNLRALLIYAISATVFTVILFLIMLVMRKRVALTIALFHVAGKVFIHLPLLVFQPFWTFFALVLFWVYWIMTLLFLGTTGSPVQNEQGFVEFKISGPLQYMWWYHVVGLIWISEFILACQQMTVAGAVVTYYFTRDKRNLPFTPILASVNRLIRYHLGTVAKGSFIITLVKIPRMILMYIHSQLKGKENACARCVLKSCICCLWCLEKCLNYLNQNAYTATAINSTNFCTSAKDAFVILVENALRVATINTVGDFMLFLGKVLIVCSTGLAGIMLLNYQQDYTVWVLPLIIVCLFAFLVAHCFLSIYEMVVDVLFLCFAIDTKYNDGSPGREFYMDKVLMEFVENSRKAMKEAGKGGVADSRELKPMASGASSA

SEQ ID NO: 4119 - protein, 103 aa, Homo sapiens [sequence omitted]

SEQ ID NO: 4120 - protein, 835 aa, Homo sapiens
MAASAAAASAAAASAASGSPGPGEGSAGGEKRSTAPSAAASASASAAASSPAGGGAEALELLEHCGVCRERLRPEREPRLLPCLHSACSACLGPAAPAAANSSGDGGAAGDGTVVDCPVCKQQCFSKDIVENYFMRDSGSKAATDAQDANQCCTSCEDNAPATSYCVECSEPLCETCVEAHQRVKYTKDHTVRSTGPAKSRDGERTVYCNVHKHEPLVLFCESCDTLTCRDCQLNAHKDHQYQFLEDAVRNQRKLLASLVKRLGDKHATLQKSTKEVRSSIRQVSDVQKRVQVDVKMAILQIMKELNKRGRVLVNDAQKVTEGQQERLERQHWTMTKIQKHQEHILRFASWALESDNNTALLLSKKLIYFQLHRALKMIVDPVEPHGEMKFQWDLNAWTKSAEAFGKIVAERPGTNSTGPAPMAPPRAPGPLSKQGSGSSQPMEVQEGYGFGSGDDPYSSAEPHVSGVKRSRSGEGEVSGLMRKVPRVSLERLDLDLTADSQPPVFKVFPGSTTEDYNLIVIERGAAAAATGQPGTAPAGTPGAPPLAGMAIVKEEETEAAIGAPPTATEGPETKPVLMALAEGPGAEGPRLASPSGSTSSGLEVVAPEGTSAPGGGPGTLDDSATICRVCQKPGDLVMCNQCEFCFHLDCHLPALQDVPGEEWSCSLCHVLPDLKEEDGSLSLDGADSTGVVAKLSPANQRKCERVLLALFCHEPCRPLHQLATDSTFSLDQPGGTLDLTLIRARLQEKLSPPYSSPQEFAQDVGRMFKQFNKLTEDKADVQSIIGLQRFFETRMNEAFGDTKFSAVLVEPPPMSLPGAGLSSQELSGGPGDGP

SEQ ID NO: 4121 - protein, 343 aa, Homo sapiens
MEAPEPGEALELSLAGAHGHGVHKKKHKKHKKKHKKKHHQEEDAGPTQPSPAKPQLKLKIKLGGQVLGTKSVPTFTVIPEGPRSPSPLMVVDNEEEPMEGVPLEQYRAWLDEDSNLSPSPLRDLSGGLGGQEEEEEQRWLDALEKGELDDNGDLKKEINERLLTARQRALLQKARSQPSPMLPLPVAEGCPPPALTEEMLLKREERARKRRLQAARRAEEHKNQTIERLTKTAATSGRGGRGGARGERRGGRAAAPAPMVRYCSGAQGSTLSFPPGVPAPTAVSQRPSPSGPPPRCSVPGCPHPRRYACSRTGQALCSLQCYRINLQMRLGGPEGPGSPLLAT

SEQ ID NO: 4122 - protein, 729 aa, Homo sapiens
MNKGWLELESDPGLFTLLVEDFGVKGVQVEEIYDLQSKCQGPVYGFIFLFKWIEERRSRRKVSTLVDDTSVIDDDIVNNMFFAHQLIPNSCATHALLSVLLNCSSVDLGPTLSRMKDFTKGFSPESKGYAIGNAPELAKAHNSHARPEPRHLPEKQNGLSAVRTMEAFHFVSYVPITGRLFELDGLKVYPIDHGPWGEDEEWTDKARRVIMERIGLATAGEPYHDIRFNLMAVVPDRRIKYEARLHVLKVNRQTVLEALQQLIRVTQPELIQTHKSQESQLPEESKSASNKSPLVLEANRAPAASEGNHTDGAEEAAGSCAQAPSHSPPNKPKLVVKPPGSSLNGVHPNPTPIVQRLPAFLDNHNYAKSPMQEEEDLAAGVGRSRVPVRPPQQYSDDEDDYEDDEEDDVQNTNSALRYKGKGTGKPGALSGSADGQLSVLQPNTINVLAEKLKESQKDLSIPLSIKTSSGAGSPAVAVPTHSQPSPTPSNESTDTASEIGSAFNSPLRSPIRSANPTRPSSPVTSHISKVLFGEDDSLLRVDCIRYNRAVRDLGPVISTGLLHLAEDGVLSPLALTEGGKGSSPSIRPIQGSQGSSSPVEKEVVEATDSREKTGMVRPGEPLSGEKYSPKELLALLKCVEAEIANYEACLKEEVEKRKKFKIDDQRRTHNYDEFICTFISMLAQEGMLANLVEQNISVRRRQGVSIGRLHKQRKPDRRKRSRPYKAKRQ

SEQ ID NO: 4123 - protein, 840 aa, Homo sapiens
MAGPGSTGGQIGAAALAGGARSKVAPSVDFDHSCSDSVEYLTLNFGPFETVHRWRRLPPCDEFVGARRSKHTVVAYKDAIYVFGGDNGKTMLNDLLRFDVKDCSWCRAFTTGTPPAPRYHHSAVVYGSSMFVFGGYTGDIYSNSNLKNKNDLFEYKFATGQWTEWKIEGRLPVARSAHGATVYSDKLWIFAGYDGNARLNDMWTIGLQDRELTCWEEVAQSGEIPPSCCNFPVAVCRDKMFVFSGQSGAKITNNLFQFEFKDKTWTRIPTEHLLRGSPPPPQRRYGHTMVAFDRHLYVFGGAADNTLPNELHCYDVDFQTWEVVQPSSDSEVGGAEVPERACASEEVPTLTYEERVGFKKSRDVFGLDFGTTSAKQPTQPASELPSGRLFHAAAVISDAMYIFGGTVDNNIRSGEMYRFQFSCYPKCTLHEDYGRLWESRQFCDVEFVLGEKEECVQGHVAIVTARSRWLRRKITQARERLAQKLEQEAAPVPREAPGVAAGGARPPLLHVAIREAEARPFEVLMQFLYTDKIKYPRKGHVEDVLLIMDVYKLALSFQLCRLEQLCRQYIEASVDLQNVLVVCESAARLQLSQLKEHCLNFVVKESHFNQVIMMKEFERLSSPLIVEIVRRKQQPPPRTPLDQPVDIGTSLIQDMKAYLEGAGAEFCDITLLLDGHPRPAHKAILAARSSYFEAMFRSFMPEDGQVNISIGEMVPSRQAFESMLRYIYYGEVNMPPEDSLYLFAAPYYYGFYNNRLQAYCKQNLEMNVTVQNVLQILEAADKTQALDMKRHCLHIIVHQFTKVSKLPTLRSLSQQLLLDIIDSLASHISDKQCAELGADI

SEQ ID NO: 4124 - protein, 300 aa, Homo sapiens
MEPPMEPSGGEQEPGAVRFLDLPWEDVLLPHVLNRVPLRQLLRLQRVSRAFRSLVQLHLAGLRRFDAAQVGPQIPRAALARLLRDAEGLQELALAPCHEWLSDEDLVPVLARNPQLRSVALGGCGQLSRRALGALAEGCPRLQRLSLAHCDWVDGLALRGLADHCPALEELDLTACRQLKDEAIVYLAQRRGAGLRSLSLAVNANVGDAAVQELARNCPELHHLDLTGCLRVGSDGVRTLAEYCPVLRSLRVRHCHHVAESSLSRLRKRGVDIDVEPPLHQALVLLQDMAGFAPFVNLQV

SEQ ID NO: 4125 - protein, 1056 aa, Homo sapiens
MMGDYRLPDHPQPMEILNLYLGDSLEPHPGECPRETCSHEDPPEPFEEQTWATDPPEPTRQNVPPWGSGVELTHLGSWVHQDGLEPCQEQTRATDPPESTRQDAPPWGSGVELTHLGSPSAQREHRQNTASPGSPVNSHLPGSPKQNRSTSTQVVFWAGILQAQMCVLDLEEELEKTEGLKAGLKCCLPTPPVDLPGDTGLHSSPPENEDSGEDSSEPEGEGQAWLREGTPDSSPQWGAEEESMFFSNPLFLASPCSENSASGECFSWGASDSHAGVRTGPESPATLEPPLPEDTVLWELESEPDLGDGAAISGHCTPPFPVPIYKPHSICWASVAAAEGAPAAPPGHGESEGDRLGPAPSAAPCVDEALTWESGCVGSDLGPAAHPVQPWASLSPEGWQRGGPFWPQVTLNSQDRDEREGGHPQESLPCTLAPCPWRSPASSPEPSSPESESRGPGPRPSPASSQEGSPQLQHHSSGILPKWTLDASQSSLLETDGEQPSSLKKKEAGEAPKPGEEVKSEGTARPAETGDVQPDIHLTSAEHENLRTPMNSSWLPGSPMPQAQSPEEGQRPPAGDKLANGVRNNKVAWNLASRLYRLEGFRKSEVAAYLQKNNDFSRAVAEEYLSFFQFGGQSLDRALRSFLQALVLSGETQERERILYQFSRRFHHCNPGIFPSVDSVHTLTCAIMLLNTDLHGQNIGKSMSCQEFITNLNGLRDGGNFPKELLKALYWSIRSEKLEWAVDEEDTARPEKAQPSLPAGKMSKPFLQLAQDPTVPTYKQGILARKMHQDADGKKTPWGKRGWKMFHTLLRGMVLYFLKQGEDHCLEGESLVGQMVDEPVGVHHSLATPATHYTKKPHVFQLRTADWRLYLFQAPTAKEMSSWIARINLAAATHSAPPFPAAVGSQRRFVRPILPVGPAQSSLEEQHRSHENCLDAAADDLLDLQRNLPERRGRGRELEEHRLRKEYLEYEKTRYETYVQLLVARLHCPSDALDLWEEQLGREAGGTREPKLSLKKSHSSPSLHQDEAPTTAKVKRNISERRTYRKIIPKRNRNQL

SEQ ID NO: 4126 - protein, 548 aa, Homo sapiens
MAAPPARADADPSPTSPPTARDTPGRQAEKSETACEDRSNAESLDRLLPPVGTGRSPRKRTTSQCKSEPPLLRTSKRTIYTAGRPPWYNEHGTQSKEAFAIGLGGGSASGKTTVARMIIEALDVPWVVLLSMDSFYKVLTEQQQEQAAHNNFNFDHPDAFDFDLIISTLKKLKQGKSVKVPIYDFTTHSRKKDWKTLYGANVIIFEGIMAFADKTLLELLDMKIFVDTDSDIRLVRRLRRDISERGRDIEGVIKQYNKFVKPSFDQYIQPTMRLADIVVPRGSGNTVAIDLIVQHVHSQLEERELSVRAALASAHQCHPLPRTLSVLKSTPQVRGMHTIIRDKETSRDEFIFYSKRLMRLLIEHALSFLPFQDCVVQTPQGQDYAGKCYAGKQITGVSILRAGETMEPALRAVCKDVRIGTILIQTNQLTGEPELHYLRLPKDISDDHVILMDCTVSTGAAAMMAVRVLLDHDVPEDKIFLLSLLMAEMGVHSVAYAFPRVRIITTAVDKRVNDLFRIIPGIGNFGDRYFGTDAVPDGSDEEEVAYTG

SEQ ID NO: 4127 - protein, 836 aa, Homo sapiens
MSKLSFRARALDASKPLPVFRCEDLPDLHEYASINRAVPQMPTGMEKEEESEHHLQRAISAQQVYGEKRDNMVIPVPEAESNIAYYESIYPGEFKMPKQLIHIQPFSLDAEQPDYDLDSEDEVFVNKLKKKMDICPLQFEEMIDRLEKGSGQQPVSLQEAKLLLKEDDELIREVYEYWIKKRKNCRGPSLIPSVKQEKRDGSSTNDPYVAFRRRTEKMQTRKNRKNDEASYEKMLKLRRDLSRAVTILEMIKRREKSKRELLHLTLEIMEKRYNLGDYNGEIMSEVMAQRQPMKPTYAIPIIPITNSSQFKHQEAMDVKEFKVNKQDKADLIRPKRKYEKKPKVLPSSAAATPQQTSPAALPVFNAKDLNQYDFPSSDEEPLSQVLSGSSEAEEDNDPDGPFAFRRKAGCQYYAPHLDQTGNWPWTSPKDGGLGDVRYRYCLTTLTVPQRCIGFARRRVGRGGRVLLDRAHSDYDSVFHHLDLEMLSSPQHSPVNQFANTSETNTSDKSFSKDLSQILVNIKSCRWRHFRPRTPSLHDSDNDELSCRKLYRSINRTGTAQPGTQTCSTSTQSKSSSGSAHFAFTAEQYQQHQQQLALMQKQQLAQIQQQQANSNSSTNTSQNLASNQQKSGFRLNIQGLERTLQGFVSKTLDSASAQFAASALVTSEQLMGFKMKDDVVLGIGVNGVLPASGVYKGLHLSSTTPTALVHTSPSTAGSALLQPSNITQTSSSHSALSHQVTAANSATTQVLIGNNIRLTVPSSVATVNSIAPINARHIPRTLSAVPSSALKLAAAANCQVSKVPSSSSVDSVPRENHESEKPALNNIADNTVAMEVT

SEQ ID NO: 4128 - protein, 1582 aa, Homo sapiens
MPENPATDKLQVLQVLDRLKMKLQEKGDTSQNEKLSMFYETLKSPLFNQILTLQQSIKQLKGQLNHIPSDCSANFDFSRKGLLVFTDGSITNGNVHRPSNNSTVSGLFPWTPKLGNEDFNSVIQQMAQGRQIEYIDIERPSTGGLGFSVVALRSQNLGKVDIFVKDVQPGSVADRDQRLKENDQILAINHTPLDQNISHQQAIALLQQTTGSLRLIVAREPVHTKSSTSSSLNDTTLPETVCWGHVEEVELINDGSGLGFGIVGGKTSGVVVRTIVPGGLADRDGRLQTGDHILKIGGTNVQGMTSEQVAQVLRNCGNSVRMLVARDPAGDISVTPPAPAALPVALPTVASKGPGSDSSLFETYNVELVRKDGQSLGIRIVGYVGTSHTGEASGIYVKSIIPGSAAYHNGHIQVNDKIVAVDGVNIQGFANHDVVEVLRNAGQVVHLTLVRRKTSSSTSPLEPPSDRGTVVEPLKPPALFLTGAVETETNVDGEDEEIKERIDTLKNDNIQALEKLEKVPDSPENELKSRWENLLGPDYEVMVATLDTQIADDAELQKYSKLLPIHTLRLGVEVDSFDGHHYISSIVSGGPVDTLGLLQPEDELLEVNGMQLYGKSRREAVSFLKEVPPPFTLVCCRRLFDDEASVDEPRRTETSLPETEVDHNMDVNTEEDDDGELALWSPEVKIVELVKDCKGLGFSILDYQDPLDPTRSVIVIRSLVADGVAERSGGLLPGDRLVSVNEYCLDNTSLAEAVEILKAVPPGLVHLGICKPLVEDNEEESCYILHSSSNEDKTEFSGTIHDINSSLILEAPKGFRDEPYFKEELVDEPFLDLGKSFHSQQKEIEQSKEAWEMHEFLTPRLQEMDEEREMLVDEEYELYQDPSPSMELYPLSHIQEATPVPSVNELHFGTQWLHDNEPSESQEARTGRTVYSQEAQPYGYCPENVMKENFVMESLPSVPSTEGNSQQGRFDDLENLNSLAKTSLDLGMIPNDVQGPSLLIDLPVVAQRREQEDLPLYQHQATRVISKASAYTGMLSSRYATDTCELPEREEGEGEETPNFSHWGPPRIVEIFREPNVSLGISIVGGQTVIKRLKNGEELKGIFIKQVLEDSPAGKTNALKTGDKILEVSGVDLQNASHSEAVEAIKNAGNPVVFIVQSLSSTPRVIPNVHNKANKITGNQNQDTQEKKEKRQGTAPPPMKLPPPYKALTDDSDENEEEDAFTDQKIRQRYADLPGELHIIELEKDKNGLGLSLAGNKDRSRMSIFVVGINPEGPAAADGRMRIGDELLEINNQILYGRSHQNASAIIKTAPSKVKLVFIRNEDAVNQMAVTPFPVPSSSPSSIEDQSGTEPISSEEDGSVEVGIKQLPESESFKLAVSQMKQQKYPTKVSFSSQEIPLAPASSYHSTDADFTGYGGFQAPLSVDPATCPIVPGQEMIIEISKGRSGLGLSIVGGKDTPLFWRLGSPRAWSQHLVRAFMLHHPVTEVEGQNAIVIHEVYEEGAAARDGRLWAGDQILEVNGVDLRNSSHEEAITALRQTPQKVRLVVYRDEAHYRDEENLEIFPVDLQKKAGRGLGLSIVGKR

SEQ ID NO: 4129 - protein, 1801 aa, Homo sapiens
MPENPATDKLQVLQVLDRLKMKLQEKGDTSQNEKLSMFYETLKSPLFNQILTLQQSIKQLKGQLNHIPSDCSANFDFSRKGLLVFTDGSITNGNVHRPSNNSTVSGLFPWTPKLGNEDFNSVIQQMAQGRQIEYIDIERPSTGGLGFSVVALRSQNLGKVDIFVKDVQPGSVADRDQRLKENDQILAINHTPLDQNISHQQAIALLQQTTGSLRLIVAREPVHTKSSTSSSLNDTTLPETVCWGHVEEVELINDGSGLGFGIVGGKTSGVVVRTIVPGGLADRDGRLQTGDHILKIGGTNVQGMTSEQVAQVLRNCGNSVRMLVARDPAGDISVTPPAPAALPVALPTVASKGPGSDSSLFETYNVELVRKDGQSLGIRIVGYVGTSHTGEASGIYVKSIIPGSAAYHNGHIQVNDKIVAVDGVNIQGFANHDVVEVLRNAGQVVHLTLVRRKTSSSTSPLEPPSDRGTVVEPLKPPALFLTGAVETETNVDGEDEEIKERIDTLKNDNIQALEKLEKVPDSPENELKSRWENLLGPDYEVMVATLDTQIADDAELQKYSKLLPIHTLRLGVEVDSFDGHHYISSIVSGGPVDTLGLLQPEDELLEVNGMQLYGKSRREAVSFLKEVPPPFTLVCCRRLFDDEASVDEPRRTETSLPETEVDHNMDVNTEEDDDGELALWSPEVKIVELVKDCKGLGFSILDYQDPLDPTRSVIVIRSLVADGVAERSGGLLPGDRLVSVNEYCLDNTSLAEAVEILKAVPPGLVHLGICKPLVEDNEEESCYILHSSSNEDKTEFSGTIHDINSSLILEAPKGFRDEPYFKEELVDEPFLDLGKSFHSQQKEIEQSKEAWEMHEFLTPRLQEMDEEREMLVDEEYELYQDPSPSMELYPLSHIQEATPVPSVNELHFGTQWLHDNEPSESQEARTGRTVYSQEAQPYGYCPENVMKENFVMESLPSVPSTEGNSQQGRFDDLENLNSLAKTSLDLGMIPNDVQGPSLLIDLPVVAQRREQEDLPLYQHQATRVISKASAYTGMLSSRYATDTCELPEREEGEGEETPNFSHWGPPRIVEIFREPNVSLGISIVGGQTVIKRLKNGEELKGIFIKQVLEDSPAGKTNALKTGDKILEVSGVDLQNASHSEAVEAIKNAGNPVVFIVQSLSSTPRVIPNVHNKANKITGNQNQDTQEKKEKRQGTAPPPMKLPPPYKALTDDSDENEEEDAFTDQKIRQRYADLPGELHIIELEKDKNGLGLSLAGNKDRSRMSIFVVGINPEGPAAADGRMRIGDELLEINNQILYGRSHQNASAIIKTAPSKVKLVFIRNEDAVNQMAVTPFPVPSSSPSSIEDQSGTEPISSEEDGSVEVGIKQLPESESFKLAVSQMKQQKYPTKVSFSSQEIPLAPASSYHSTDADFTGYGGFQAPLSVDPATCPIVPGQEMIIEISKGRSGLGLSIVGGKDTPLNAIVIHEVYEEGAAARDGRLWAGDQILEVNGVDLRNSSHEEAITALRQTPQKVRLVVYRDEAHYRDEENLEIFPVDLQKKAGRGLGLSIVGKRNGSGVFISDIVKGGAADLDGRLIQGDQILSVNGEDMRNASQETVATILKCAQGLVQLEIGRLRAGSWTSARTTSQNSQGSQQSAHSSCHPSFAPVITGLQNLVGTKRVSDPSQKNSGTDMEPRTVEINRELSDALGISIAGGRGSPLGDIPVFIAMIQASGVAARTQKLKVGDRIVSINGQPLDGLSHADVVNLLKNAYGRIILQVVADTNISAIAAQLENMSTGYHLGSPTAEHHPEDTEEQLQMTAD

SEQ ID NO: 4130 - protein, 1552 aa, Homo sapiens
MPENPATDKLQVLQVLDRLKMKLQEKGDTSQNEKLSMFYETLKSPLFNQILTLQQSIKQLKGQLNHIPSDCSANFDFSRKGLLVFTDGSITNGNVHRPSNNSTVSGLFPWTPKLGNEDFNSVIQQMAQGRQIEYIDIERPSTGGLGFSVVALRSQNLGKVDIFVKDVQPGSVADRDQRLKENDQILAINHTPLDQNISHQQAIALLQQTTGSLRLIVAREPVHTKSSTSSSLNDTTLPETVCWGHVEEVELINDGSGLGFGIVGGKTSGVVVRTIVPGGLADRDGRLQTGDHILKIGGTNVQGMTSEQVAQVLRNCGNSVRMLVARDPAGDISVTPPAPAALPVALPTVASKGPGSDSSLFETYNVELVRKDGQSLGIRIVGYVGTSHTGEASGIYVKSIIPGSAAYHNGHIQVNDKIVAVDGVNIQGFANHDVVEVLRNAGQVVHLTLVRRKTSSSTSPLEPPSDRGTVVEPLKPPALFLTGAVETETNVDGEDEEIKERIDTLKNDNIQALEKLEKVPDSPENELKSRWENLLGPDYEVMVATLDTQIADDAELQKYSKLLPIHTLRLGVEVDSFDGHHYISSIVSGGPVDTLGLLQPEDELLEVNGMQLYGKSRREAVSFLKEVPPPFTLVCCRRLFDDEASVDEPRRTETSLPETEVDHNMDVNTEEDDDGELALWSPEVKIVELVKDCKGLGFSILDYQDPLDPTRSVIVIRSLVADGVAERSGGLLPGDRLVSVNEYCLDNTSLAEAVEILKAVPPGLVHLGICKPLVEDNEEESCYILHSSSNEDKTEFSGTIHDINSSLILEAPKGFRDEPYFKEELVDEPFLDLGKSFHSQQKEIEQSKEAWEMHEFLTPRLQEMDEEREMLVDEEYELYQDPSPSMELYPLSHIQEATPVPSVNELHFGTQWLHDNEPSESQEARTGRTVYSQEAQPYGYCPENVMKENFVMESLPSVPSTEGNSQQGRFDDLENLNSLAKTSLDLGMIPNDVQGPSLLIDLPVVAQRREQEDLPLYQHQATRVISKASAYTGMLSSRYATDTCELPEREEGEGEETPNFSHWGPPRIVEIFREPNVSLGISIVGGQTVIKRLKNGEELKGIFIKQVLEDSPAGKTNALKTGDKILEVSGVDLQNASHSEAVEAIKNAGNPVVFIVQSLSSTPRVIPNVHNKANKITGNQNQDTQEKKEKRQGTAPPPMKLPPPYKALTDDSDENEEEDAFTDQKIRQRYADLPGELHIIELEKDKNGLGLSLAGNKDRSRMSIFVVGINPEGPAAADGRMRIGDELLEINNQILYGRSHQNASAIIKTAPSKVKLVFIRNEDAVNQMAVTPFPVPSSSPSSIEDQSGTEPISSEEDGSVEVGIKQLPESESFKLAVSQMKQQKYPTKVSFSSQEIPLAPASSYHSTDADFTGYGGFQAPLSVDPATCPIVPGQEMIIEISKGRSGLGLSIVGGKDTPLNAIVIHEVYEEGAAARDGRLWAGDQILEVNGVDLRNSSHEEAITALRQTPQKVRLVVYRDEAHYRDEENLEIFPVDLQKKAGRGLGLSIVGKR

SEQ ID NO: 4131 - protein, 1524 aa, Homo sapiens
MPENPATDKLQVLQVLDRLKMKLQEKGDTSQNEKLSMFYETLKSPLFNQILTLQQSIKQLKGQLNHIPSDCSANFDFSRKGLLVFTDGSITNGNVHRPSNNSTVSGLFPWTPKLGNEDFNSVIQQMAQGRQIEYIDIERPSTGGLGFSVVALRSQNLGKVDIFVKDVQPGSVADRDQRLKENDQILAINHTPLDQNISHQQAIALLQQTTGSLRLIVAREPVHTKSSTSSSLNDTTLPETVCWGHVEEVELINDGSGLGFGIVGGKTSGVVVRTIVPGGLADRDGRLQTGDHILKIGGTNVQGMTSEQVAQVLRNCGNSVRMLVARDPAGDISVTPPAPAALPVALPTVASKGPGSDSSLFETYNVELVRKDGQSLGIRIVGYVGTSHTGEASGIYVKSIIPGSAAYHNGHIQVNDKIVAVDGVNIQGFANHDVVEVLRNAGQVVHLTLVRRKTSSSTSPLEPPSDRGTVVEPLKPPALFLTGAVETETNVDGEDEEIKERIDTLKNDNIQALEKLEKVPDSPENELKSRWENLLGPDYEVMVATLDTQIADDAELQKYSKLLPIHTLRLGVEVDSFDGHHYISSIVSGGPVDTLGLLQPEDELLEVNGMQLYGKSRREAVSFLKEVPPPFTLVCCRRLFDDEASVDEPRRTETSLPETEVDHNMDVNTEEDDDGELALWSPEVKIVELVKDCKGLGFSILDYQDPLDPTRSVIVIRSLVADGVAERSGGLLPGDRLVSVNEYCLDNTSLAEAVEILKAVPPGLVHLGICKPLVEDNEEESCYILHSSSNEDKTEFSGTIHDINSSLILEAPKGFRDEPYFKEELVDEPFLDLGKSFHSQQKEIEQSKEAWEMHEFLTPRLQEMDEEREMLVDEEYELYQDPSPSMELYPLSHIQEATPVPSVNELHFGTQWLHDNEPSESQEARTGRTVYSQEAQPYGYCPENVMKENFVMESLPSVPSTEGNSQQGRFDDLENLNSLAKTSLDLGMIPNDVQGPSLLIDLPVVAQRREQEDLPLYQHQATRVISKASAYTGMLSSRYATDTCELPEREEGEGEETPNFSHWGPPRIVEIFREPNVSLGISIVGGQTVIKRLKNGEELKGIFIKQVLEDSPAGKTNALKTGDKILEVSGVDLQNASHSEAVEAIKNAGNPVVFIVQSLSSTPRVIPNVHNKANKITGNQNQDTQEKKEKRQGTAPPPMKLPPPYKALTDDSDENEEEDAFTDQKIRQRYADLPGELHIIELEKDKNGLGLSLAGNKDRSRMSIFVVGINPEGPAAADGRMRIGDELLEINNQILYGRSHQNASAIIKTAPSKVKLVFIRNEDAVNQMAVTPFPVPSSSPSSIEDQSGTEPISSEEDGSVEVGIKQLPESESFKLAVSQMKQQKYPTKVSFSSQEIPLAPASSYHSTDADFTGYGGFQAPLSVDPATCPIVPGQEMIIEISKGRSGLGLSIVGGKDTPLVNGVDLRNSSHEEAITALRQTPQKVRLVVYRDEAHYRDEENLEIFPVDLQKKAGRGLGLSIVGKR

SEQ ID NO: 4132 - protein, 213 aa, Homo sapiens
MAETYDFLFKFLVIGSAGTGKSCLLHQFIENKFKQDSNHTIGVEFGSRVVNVGGKTVKLQIWDTAGQERFRSVTRSYYRGAAGALLVYDITSRETYNSLAAWLTDARTLASPNIVVILCGNKKDLDPEREVTFLEASRFAQENELMFLETSALTGENVEEAFLKCARTILNKIDSGELDPERMGSGIQYGDASLRQLRQPRSAQAVAPQPCGC

SEQ ID NO: 4133 - protein, 1077 aa, Homo sapiens
MPRRKQEQPKRLPSHVSRQEEAEGELSEGEHWYGNSSEAPSEASYGEVQENYKLSLEDRIQEQSTSPDTSLGSTTPSSHTLELVALDSEVLRDSLQCQDHLSPGVSSLCDDDPGSNKPLSSNLRRLLEAGSLKLDAAATANGRVESPVNVGSNLSFSPPSHHARQLSVLARKLAEKQEQNDQYTPSNRFIWNQGKWLPNSTTTCSLSPDSAILKLKAAANAVLQDKSLTRTEETMRFESLSSPFSSQSASSTLAALSKKVSERSLTPGQEHPPPASSFLSLASMTSSAALLKEVAARAAGSLLAEKSSLLPEDPLPPPPSEKKPEKVTPPPPPPPPPPPPPPPQSLELLLLPVPKGRVSKPSNSASEEESGKPFQCPICGLVIKRKSYWKRHMVIHTGLKSHQCPLCPFRCARKDNLKSHMKVHQHQDRGETFQCQLCPFTSSRHFSLKLHMRCHQHFLRTEAKVKEEIPDPDVKGSPHLSDSACLGQQREGGGTELVGTMMTSNTPERTSQGGAGVSPLLVKEEPKEDNGLPTSFTLNAADRPANHTKLKDPSEYVANSASALFSQDISVKMASDFLMKLSAANQKEPMNLNFKVKEEPKEGESLSTTLPRSSYVFSPESEVSAPGVSEDALKPQEGKGSVLRRDVSVKAASELLMKLSAESYKETQMVKIKEEPMEVDIQDSHVSISPSRNVGYSTLIGREKTEPLQKMPEGRVPPERNLFSQDISVKMASELLFQLSEKVSKEHNHTKENTIRTTTSPFFSEDTFRQSPFTSNSKELLPSDSVLHGRISAPETEKIVLEAGNGLPSWKFNDQLFPCDVCGKVFGRQQTLSRHLSLHTEERKYKCHLCPYAAKCRANLNQHLTVHSVKLVSTDTEDIVSAVTSEGSDGKKHPYYYSCHVCGFGTELNVQFVSHMSLHVDKEQWMFSICCTACDFVTMEEAEIKTHIGTKHTGEDRKTPSESNSPSSSSLSALSDSANSKDDSDGSQKNKGGNNLLVISVMPGSQPSLNSEEKPEKGFECVFCNFVCKTKNMFERHLQIHLITRMFECDVCHKFMKTPEQLLEHKKCHTVPTGGLK

SEQ ID NO: 4134 - protein, 631 aa, Homo sapiens
MALRKELLKSIWYAFTALDVEKSGKVSKSQLKVLSHNLYTVLHIPHDPVALEEHFRDDDDGPVSSQGYMPYLNKYILDKVEEGAFVKEHFDELCWTLTAKKNYRADSNGNSMLSNQDAFRLWCLFNFLSEDKYPLIMVPDEVEYLLKKVLSSMSLEVSLGELEELLAQEAQVAQTTGGLSVWQFLELFNSGRCLRGVGRDTLSMAIHEVYQELIQDVLKQGYLWKRGHLRRNWAERWFQLQPSCLCYFGSEECKEKRGIIPLDAHCCVEVLPDRDGKRCMFCVKTATRTYEMSASDTRQRQEWTAAIQMAIRLQAEGKTSLHKDLKQKRREQREQRERRRAAKEEELLRLQQLQEEKERKLQELELLQEAQRQAERLLQEEEERRRSQHRELQQALEGQLREAEQARASMQAEMELKEEEAARQRQRIKELEEMQQRLQEALQLEVKARRDEESVRIAQTRLLEEEEEKLKQLMQLKEEQERYIERAQQEKEELQQEMAQQSRSLQQAQQQLEEVRQNRQRADEDVEAAQRKLRQASTNVKHWNVQMNRLMHPIEPGDKRPVTSSSFSGFQPPLLAHRDSSLKRLTRWGSQGNRTPSPNSNEQQKSLNGGDEAPAPASTPQEDKLDPAPEN

SEQ ID NO: 4135 - protein, 233 aa, Homo sapiens
MNRLPDDYDPYAVEEPSDEEPALSSSEDEVDVLLHGTPDQKRKLIRECLTGESESSSEDEFEKEMEAELNSTMKTMEDKLSSLGTGSSSGNGKVATAPTRYYDDIYFDSDSEDEDRAVQVTKKKKKKQHKIPTNDELLYDPEKDNRDQAWVDAQRRGYHGLGPQRSRQQQPVPNSDAGLELSCLHDHTLALIAKGMNHTKTQYRAMFVMNCSINKEEVLRYKASENKEEKAGP

SEQ ID NO: 4136 - protein, 1867 aa, Homo sapiens
MARLADYFVLVAFGPHPRGSGEGQGQILQRFPEKDWEDNPFPQGIELFCQPSGWQLCPERNPPTFFVAVLTDINSERHYCACLTFWEPAEPSQETTRVEDATEREEEGDEGGQTHLSPTAPAPSAQLFAPKTLVLVSRLDHTEVFRNSLGLIYAIHVEGLNVCLENVIGNLLTCTVPLAGGSQRTISLGAGDRQVIQTPLADSLPVSRCSVALLFRQLGITNVLSLFCAALTEHKVLFLSRSYQRLADACRGLLALLFPLRYSFTYVPILPAQLLEVLSTPTPFIIGVNAAFQAETQELLDVIVADLDGGTVTIPECVHIPPLPEPLQSQTHSVLSMVLDPELELADLAFPPPTTSTSSLKMQDKELRAVFLRLFAQLLQGYRWCLHVVRIHPEPVIRFHKAAFLGQRGLVEDDFLMKVLEGMAFAGFVSERGVPYRPTDLFDELVAHEVARMRADENHPQRVLRHVQELAEQLYKNENPYPAVAMHKVQRPGESSHLRRVPRPFPRLDEGTVQWIVDQAAAKMQGAPPAVKAERRTTVPSGPPMTAILERCSGLHVNSARRLEVVRNCISYVFEGKMLEAKKLLPAVLRALKGRAARRCLAQELHLHVQQNRAVLDHQQFDFVVRMMNCCLQDCTSLDEHGIAAALLPLVTAFCRKLSPGVTQFAYSCVQEHVVWSTPQFWEAMFYGDVQTHIRALYLEPTEDLAPAQEVGEAPSQEDERSALDVASEQRRLWPTLSREKQQELVQKEESTVFSQAIHYANRMSYLLLPLDSSKSRLLRERAGLGDLESASNSLVTNSMAGSVAESYDTESGFEDAETCDVAGAVVRFINRFVDKVCTESGVTSDHLKGLHVMVPDIVQMHIETLEAVQRESRRLPPIQKPKLLRPRLLPGEECVLDGLRVYLLPDGREEGAGGSAGGPALLPAEGAVFLTTYRVIFTGMPTDPLVGEQVVVRSFPVAALTKEKRISVQTPVDQLLQDGLQLRSCTFQLLKMAFDEEVGSDSAELFRKQLHKLRYPPDIRATFAFTLGSAHTPGRPPRVTKDKGPSLRTLSRNLVKNAKKTIGRQHVTRKKYNPPSWEHRGQPPPEDQEDEISVSEELEPSTLTPSSALKPSDRMTMSSLVERACCRDYQRLGLGTLSSSLSRAKSEPFRISPVNRMYAICRSYPGLLIVPQSVQDNALQRVSRCYRQNRFPVVCWRSGRSKAVLLRSGGLHGKGVVGLFKAQNAPSPGQSQADSSSLEQEKYLQAVVSSMPRYADASGRNTLSGFSSAHMGSHGKWGSVRTSGRSSGLGTDVGSRLAGRDALAPPQANGGPPDPGFLRPQRAALYILGDKAQLKGVRSDPLQQWELVPIEVFEARQVKASFKKLLKACVPGCPAAEPSPASFLRSLEDSEWLIQIHKLLQVSVLVVELLDSGSSVLVGLEDGWDITTQVVSLVQLLSDPFYRTLEGFRLLVEKEWLSFGHRFSHRGAHTLAGQSSGFTPVFLQFLDCVHQVHLQFPMEFEFSQFYLKFLGYHHVSRRFRTFLLDSDYERIELGLLYEEKGERRGQVPCRSVWEYVDRLSKRTPVFHNYMYAPEDAEVLRPYSNVSNLKVWDFYTEETLAEGPPYDWELAQGPPEPPEEERSDGGAPQSRRRVVWPCYDSCPRAQPDAISRLLEELQRLETELGQPAERWKDTWDRVKAAQRLEGRPDGRGTPSSLLVSTAPHHRRSLGVYLQEGPVGSTLSLSLDSDQSSGSTTSGSRQAARRSTSTLYSQFQTAESENRSYEGTLYKKGAFMKPWKARWFVLDKTKHQLRYYDHRVDTECKGVIDLAEVEAVAPGTPTMGAPKTVDEKAFFDVKTTRRVYNFCAQDVPSAQQWVDRIQSCLSDA

SEQ ID NO: 4137 - protein, 543 aa, Homo sapiens
MPNPKNSKGGRKNKRANSSGDEQENGAGALAAAGAAGAAAGGALAAAAGCGAAAAGAPGAGGAAGAGGAGTGAANAAAAAGAAAAGDAKNEAPCATPLICSFGRPVDLEKDDYQKVVCNNEHCPCSTWMHLQCFYEWESSILVQFNCIGRARSWNEKQCRQNMWTKKGYDLAFRFCSCRCGQGHLKKDTDWYQVKRMQDEKKKKSGSEKNTGRPPGEAAEEAKKCRPPNKPQKGPSHDLPRRHSMDRQNSQEKAVGAAAYGARSPGGSPGQSPPTGYSILSPAHFSGPRSSRYLGEFLKNAIHLEPHKKAMAGGHVFRNAHFDYSPAGLAVHRGGHFDTPVQFLRRLDLSELLTHIPRHKLNTFHVRMEDDAQVGQGEDLRKFILAALSASHRNVVNCALCHRALPVFEQFPLVDGTLFLSPSRHDEIEYDVPCHLQGRLMHLYAVCVDCLEGVHKIICIKCKSRWDGSWHQLGTMYTYDILAASPCCQARLNCKHCGKPVIDVRIGMQYFSEYSNVQQCPHCGNLDYHFVKPFSSFKVLEAY

SEQ ID NO: 4138 - protein, 123 aa, Homo sapiens
MARYEEVSVSGFEEFHRAVEQHNGKTIFAYFTGSKDAGGKSWCPDCVQAEPVVREGLKHISEGCVFIYCQVGEKPYWKDPNNDFRKNLKVTAVPTLLKYGTPQKLVESECLQANLVEMLFSED

SEQ ID NO: 4139 - protein, 2298 aa, Homo sapiens
MDPEEQELLNDYRYRSYSSVIEKALRNFESSSEWADLISSLGKLNKALQSNLRYSLLPRRLLISKRLAQCLHPALPSGVHLKALETYEIIFKIVGTKWLAKDLFLYSCGLFPLLAHAAVSVRPVLLTLYEKYFLPLQKLLLPSLQAFIVGLLPGLEEGSEISDRTDALLLRLSLVVGKEVFYTALWGSVLASPSIRLPASVFVVGHINRDAPGREQKYMLGTNHQLTVKSLRASLLDSNVLVQRNNLEIVLFFFPFYTCLDSNERAIPLLRSDIVRILSAATQTLLRRDMSLNRRLYAWLLGSDIKGNTVVPESEISNSYEDQSSYFFEKYSKDLLVEGLAEILHQKFIDADVEERHHAYLKPFRVLISLLDKPEIGPQVVGNLFLEVIRAFYSYCRDALGSDLKLSYTQSGNSLISAIKENRNASEIVKTVNLLITSLSTDFLWDYMTRCFEECFRPVKQRYSVRNSVSPPPTVSELCALLVFLLDVIPLELYSEVQTQYLPQVLGCLVQPLAEDMEALSLPELTHALKTCFKVLSKVQMPPSYLDTESTSGTSSPVKGENGKIILETKAVIPGDEDASFPPLKSEDSGIGLSASSPELSEHLRVPRVSLERDDVWKKGGSMQRTFLCIQELIANFASKNIFGVQLTASGEESKSEEPAGKRDRDGTQSLAANDSSRKNSWEPKPITVPQFKQMLSDLFTARGSPFKTKSSESPSSSPSSPARKNGGEWDVEKVVIDLGGSREERREAFAAACHLLLDCATFPVYLSEEETEQLCATLFQLPGAGDSSFPSWLKSLMTICCCVTDCYLQNVAISTLLEVINHSQSLALVIEDKMKRYKSSGHNPFFGKLQMVTVPPIAPGILKVIAEKTDFYQRVARVLWNQLNKETREHHVTCVELFYRLHCLAPTANICEDIICHALLDPDKGTRLEALFRFSVIWHLTREIQGSRVTSHNRSFDRSLFVVLDSLACTDGAIGAAAQGWLVRALSLGDVARILEPVLLLLLQPKTQRTSIHCLKQENSADDLHRWFNRKKTSFREACAVPEPQESGSEEHLPLSQFTTVDREAIWAEVEKEPEKYPLRGELSEEELPYYVELPDRTAHGAPDSSEHTESADTSSCHTDSENTSSFSSPSHDLQELSNEENCCAPIPMGGRAYPKRSALLAAFQSESFKAGAKLSLVRVDSDKTQASESFSSDEEADLELQALTTSRLLKQQRERQEAVEALFKHILLYLQPYDSRRVLYAFSVLEAVLKTNPKEFIEAVSRTSMDTSSTAHLNLISNLLARHQEALIGQSFYGKLQTQVPNVCPHSLLLELLTYLCLSFLRSYYPCYLKVSHRDILGNRDVQVKSVEVLIRIMMQLVSVAKSSEGKNVEFIHSLLQRCKVQEFVLLSLSASMYTSQKRYGLATAHHGRALPEDSLFEESLINLGQDQIWSEHPLQIELLKLLQVLIVLEHHLGRAHEEAENQPDLSREWQRALNFQQAISALQYVQPHPLTSQGLLVSAVVRGLQPAYGYGMHPAWVSLVTHSLPYFGKSLGWTVTPFVVQICKNLDDLVKQYESESVKLSVSTTSKRENISPDYPLTLLEGLTTISHFCLLEQANQNKKTMAAGDPANLRNARNAILEELPRTVNTMALLWNVLRKEETQKRPVDLLGATKGSSSVYFKTTKTIRQKILDFLNPLTAHLGVQLTAAVAAVWSRKKAQRHSKMKIIPTASASQLTLVDLVCALSTLQTDTLLHLVKEVVKRPPQVKGGDEKSPLVDIPVLQFCYAFLQRLPVPALQENFSSLLGVLKESVQLNLAPPGYFLLLSMLNDFVTRTPNLENKKDQKDLQEITQKILEAVGNIAGSSLEQTSWLSRNLEVKAQPQASLEESDAEEDLYDAAAASAMVSSSAPSVYSVQALSLLAEVLASLLDMVYRSDEKEKAVPLISRLLYYVFPYLRNHSAYNAPSFRAGAQLLSSLSGYAYTKRAWRKEVLELFLDPAFFQMDTSCVHWKSIIDHLLTHEKTMFKDLMNMQSSSLKLFSSFEQKAMLLKRQAFAVFSGELDQYHLYLPLIQERLTDNLRVGQTSIVAAQMFLFFRVLLLRISPQHLTSLWPIMVSELIQTFTQLEEDLKDEDESLRSTNKVNRTKVSVPDANGPSVGEIPQSELILYLSACKFLDTALSFPPDKMPLFQIYRWAFIPEVDTEGPAFLSDVEENHQECKPHTVRILELLKLKFGEISSSDEITMKSEFPLLRQHSVSSIRQLMPFFMTLNGAFKTQRQLPADSPGTPFLDFPVTDSPRILKQLEECIEYDFLEHPEC

SEQ ID NO: 4140 - protein, 248 aa, Homo sapiens
MAAQSAPKVVLKSTTKMSLNERFTNMLKNKQPTPVNIRASMQQQQQLASARNRRLAQQMENRPSVQAALKLKQSLKQRLGKSNIQARLGRPIGALARGAIGGRGLPIIQRGLPRGGLRGGRATRTLLRGGMSLRGQNLLRGGRAVAPRMGLRRGGVRGRGGPGRGGLGRGAMGRGGIGGRGRGMIGRGRGGFGGRGRGRGRGRGALARPVLTKEQLDNQLDAYMSKTKGHLDAELDAYMAQTDPETND

SEQ ID NO: 4141 - protein, 2235 aa, Homo sapiens
MPLFFSALLVLLLVALSALFLGRWLVVRLATKWCQRKLQAELKIGSFRFFWIQNVSLKFQQHQQTVEIDNLWISSKLLSHDLPHYVALCFGEVRIRTDLQKVSDLSAPFSQSAGVDQKELSFSPSLLKIFCQLFSIHVDAINIMVLKVDTSESLWHIQISRSRFLLDSDGKRLICEVSLCKINSKVLKSGQLEDTCLVELSLALDLCLKVGISSRHLTAITVDVWTLHAELHEGLFQSQLLCQGPSLASKPVPCSEVTENLVEPTLPGLFLLQQLPDQVKVKMENTSVVLSMNSQKRHLTWTLKLLQFLYHRDEDQLPLRSFTANSDMAQMSTELLLEDGLLLSQSRQRIVCLNSLKASVQVTTIDLSASLVLNTCIIHYRHQEFSHWLHLLALETQGSSSPVLKQRKKRTFPQILAPIIFSTSISNVNISIQLGDTPPFALGFNSISLDYQHLRPQSIHQRGVLTVDHLCWRVGSDSHIQRAPHPPNMHVWGEALVLDSFTLQGSYNQPLGLSSTQSDTLFLDCTIRGLQVEASDTCAQCLSRILSLMGPQSGKSAVSRHSSFGESVSLLWKVDLKVEDMNLFTLSALVGASEVRLDTLTILGSAETSTVGIQGLVLALVKSVTEKMQPCCKAPDIPTPVLSLSMLSITYHSSIRSLEVQCGAGLTLLWSPPDHMYLYQHVLATLQCRDLLRATVFPETVPSLALETSGTTSELEGRAPEPLPPKRLLNLTLEVSTAKLTAFVAEDKFITLAAESVSLSRHGGSLQAYCPELAAGFDGNSIFNFKEVEVQLLPELEEMILHRNPFPALQTLRNRVWLLSFGSVSVEFPYQYDFSRTLDEAVGVQKWLKGLHQGTRAWASPSPVPLPPDLLLKVEHFSWVFLDDVFEVKLHDNYELMKDESKESAKRLQLLDAKVAALRKQHGELLPARKIEELYASLERKNIEIYIQRSRRLYGNTPMRRALLTWSLAGLELVALADASFHGPEHVVEQVQELDPGSPFPPEGLDLVIQWCRMLKCNVKSFLVRIRDYPRYLFEIRDWRLMGRLVGTEQSGQPCSRRRQILHLGLPWGNVAVERNMPPLKFYHDFHSEIFQYTVVWGPCWDPAWTLIGQCVDLLTKPSADPSPPLPWWDKSRLLFHGDWHMDIEQANLHQLATEDPYNTTENMHWEWSHLSFHWKPGQFVFKGDLDINVRTASKYDDCCFLHLPDLCMTLDLQWLCHGNPHDHHSVTLRAPEFLPEVPLGQLHDSYRAFRSENLNLSIKMDLTRHSGTISQPRILLYSSTLRWMQNFWATWTSVTRPICRGKLFNNLKPSKKKLGQHYKQLSYTALFPQLQVHYWASFAQQRGIQIECSQGHVFTRGTQRLIPQAGTVMRRLISDWSVTQMVSDLSQVTVHLMASPTEENADHCLDPLVTKTHLLSLSSLTYQRHSNRTAEEELSARDGDPTFHTHQLHLVDLRISWTTTNRDIAFGLYDGYKKAAVLKRNLSTEALKGLKIDPQMPAKKPKRGVPTSASAPPRVNTPSFSGQPDKGSSGGAYMLQKLIEETDRFVVFTEEESGMSDQLCGIAACQTDDIYNRNCLIELVNCQMVLRGAETEGCVIVSAAKAQLLQCQHHPAWYGDTLKQKTSWTCLLDGMQYFATTESSPTEQDGRQLWLEVKNIEEHRQRSLDSVQELMESGQAVGGMVTTTTDWNQPAEAQQAQQVQRIISRCNCRMYYISYSHDIDPELATQIKPPEVLENQEKEDLLKKQEGAVDTFTLIHHELEISTNPAQYAMILDIVNNLLLHVEPKRKEHSEKKQRVRFQLEISSNPEEQRSSILHLQEAVRQHVAQIRQLEKQMYSIMKSLQDDSKNENLLDLNQKLQLQLNQEKANLQLESEELNILIRCFKDFQLQRANKMELRKQQEDVSVVRRTEFYFAQARWRLTEEDGQLGIAELELQRFLYSKVNKSDDTAEHLLELGWFTMNNLLPNAVYKVVLRPQSSCQSGRQLALRLFSKVRPPVGGISVKEHFEVNVVPLTIQLTHQFFHRMMGFFFPGRSVEDDEVGDEEDKSKLVTTGIPVVKPRQLIATDDAVPLGPGKGVAQGLTRSSGVRRSFRKSPEHPVDDIDKMKERAAMNNSFIYIKIPQVPLCVSYKGEKNSVDWGDLNLVLPCLEYHNNTWTWLDFAMAVKRDSRKALVAQVIKEKLRLKSATGSEVRGKLETKSDLNMQQQEEEEKARLLIGLSVGDKNPGKKSIFGRRK

SEQ ID NO: 4142 - protein, 313 aa, Homo sapiens
MRRGALLAGALAAYAAYLVLGALLVARLEGPHEARLRAELETLRAQLLQRSPCVAAPALDAFVERVLAAGRLGRVVLANASGSANASDPAWDFASALFFASTLITTVGYGYTTPLTDAGKAFSIAFALLGVPTTMLLLTASAQRLSLLLTHVPLSWLSMRWGWDPRRAACWHLVALLGVVVTVCFLVPAVIFAHLEEAWSFLDAFYFCFISLSTIGLGDYVPGEAPGQPYRALYKVLVTVYLFLGLVAMVLVLQTFRHVSDLHGLTELILLPPPCPASFNADEDDRVDILGPQPESHQQLSASSHTDYASIPR

SEQ ID NO: 4143 - protein, 587 aa, Homo sapiens
MSTGFSFGSGTLGSTTVAAGGTSTGGVFSFGTGASSNPSVGLNFGNLGSTSTPATTSAPSSGFGTGLFGSKPATGFTLGGTNTGTPATTSAATTGFSLGFNKPAASATPFALPITSTSASGLTLSSALTSTPAASTGFTLNNLGGTTATTTTASTGLSLGGALAGLGGSLFQSTNTGTSGLGQNALGLTLGTTAATSTAGNEGLGGIDFSSSSDKKSDKTGTRPEDSKALKDENLPPVICQDVENLQKFVKEQKQVQEEISRMSSKAMLKVQEDIKALKQLLSLAANGIQRNTLNIDKLKIETAQELKNAEIALRTQKTPPGLQHEYAAPADYFRILVQQFEVQLQQYRQQIEELENHLATQANNSHITPQDLSMAMQKIYQTFVALAAQLQSIHENVKVLKEQYLGYRKMFLGDAVDVFETRRAEAKKWQNTPRVTTGPTPFSTMPNAAAVAMAATLTQQQQPATGPQPSLGVSFGTPFGSGIGTGLQSSGLGSSNLGGFGTSSGFGCSTTGASTFGFGTTNKPSGSLSAGFGSSSTSGFNFSNPGITASAGLTFGVSNPASAGFGTGGQLLQLKKPPAGNKRGKR

SEQ ID NO: 4144 - protein, 516 aa, Homo sapiens
MSTGFSFGSGTLGSTTVAAGGTSTGGVFSFGTGASSNPSVGLNFGNLGSTSTPATTSAPSSGFGTGLFGSKPATGFTLGGTNTGIATTITTGLTLGTPATTSAATTGFSLGFNKPAASATPFALPITSTSASGLTLSSALTSTPAASTGFTLNNLGGTTATTTTASTGLSLGGALAGLGGSLFQSTNTGTSGLGQNALGLTLGTTAATSTAGNEGLGGIDFSSSSDKKSDKTGTRPEDSKALKDENLPPVICQDVENLQKFVKEQKQVQEEISRMSSKAMLKVQEDIKALKQLLSLAANGIQRNTLNIDKLKIETAQELKNAEIALRTQKTPPGLQHEYAAPADYFRILVQQFEVQLQQYRQQIEELENHLATQANNSHITPQDLSMAMQKIYQTFVALAAQLQSIHENVKVLKEQYLGYRKMFLGDAVDVFETRRAEAKKWQNTPRVTTGPTPFSTMPNAAAVAMAATLTQQQQPATGDKWCNVAELKNRTQLSLFVNKLELSCYCVIDLLYNEQ

SEQ ID NO: 4145 - protein, 599 aa, Homo sapiens
MSTGFSFGSGTLGSTTVAAGGTSTGGVFSFGTGASSNPSVGLNFGNLGSTSTPATTSAPSSGFGTGLFGSKPATGFTLGGTNTGIATTITTGLTLGTPATTSAATTGFSLGFNKPAASATPFALPITSTSASGLTLSSALTSTPAASTGFTLNNLGGTTATTTTASTGLSLGGALAGLGGSLFQSTNTGTSGLGQNALGLTLGTTAATSTAGNEGLGGIDFSSSSDKKSDKTGTRPEDSKALKDENLPPVICQDVENLQKFVKEQKQVQEEISRMSSKAMLKVQEDIKALKQLLSLAANGIQRNTLNIDKLKIETAQELKNAEIALRTQKTPPGLQHEYAAPADYFRILVQQFEVQLQQYRQQIEELENHLATQANNSHITPQDLSMAMQKIYQTFVALAAQLQSIHENVKVLKEQYLGYRKMFLGDAVDVFETRRAEAKKWQNTPRVTTGPTPFSTMPNAAAVAMAATLTQQQQPATGPQPSLGVSFGTPFGSGIGTGLQSSGLGSSNLGGFGTSSGFGCSTTGASTFGFGTTNKPSGSLSAGFGSSSTSGFNFSNPGITASAGLTFGVSNPASAGFGTGGQLLQLKKPPAGNKRGKR

SEQ ID NO: 4146 - protein, 67 aa, Homo sapiens
MDNVQPKIKHRPFCFSVKGHVKMLRLVFALVTAVCCLADGALIYRKLLFNPSGPYQKKPVHEKKEVL

SEQ ID NO: 4147 - protein, 152 aa, Homo sapiens
MDNVQPKIKHRPFCFSVKGHVKMLRLALTVTSMTFFIIAQAPEPYIVITGFEVTVILFFILLYVLRLDRLMKWLFWPLLDIINSLVTTVFMLIVSVLALIPETTTLTVGGGVFALVTAVCCLADGALIYRKLLFNPSGPYQKKPVHEKKEVL

SEQ ID NO: 4148 - protein, 99 aa, Homo sapiens
MDNVQPKIKHRPFCFSVKGHVKMLRLDIINSLVTTVFMLIVSVLALIPETTTLTVGGGVFALVTAVCCLADGALIYRKLLFNPSGPYQKKPVHEKKEVL

SEQ ID NO: 4149 - protein, 120 aa, Homo sapiens
MDNVQPKIKHRPFCFSVKGHVKMLRLALTVTSMTFFIIAQAPEPYIVITGFEVTVILFFILLYVLRLDRLMKWLFWPLLVFALVTAVCCLADGALIYRKLLFNPSGPYQKKPVHEKKEVL

SEQ ID NO: 4150 - protein, 365 aa, Homo sapiens
MNIMDFNVKKLAADAGTFLSRAVQFTEEKLGQAEKTELDAHLENLLSKAECTKIWTEKIMKQTEVLLQPNPNARIEEFVYEKLDRKAPSRINNPELLGQYMIDAGTEFGPGTAYGNALIKCGETQKRIGTADRELIQTSALNFLTPLRNFIEGDYKTIAKERKLLQNKRLDLDAAKTRLKKAKAAETRNSSEQELRITQSEFDRQAEITRLLLEGISSTHAHHLRCLNDFVEAQMTYYAQCYQYMLDLQKQLGSFPSNYLSNNNQTSVTPVPSVLPNAIGSSAMASTSGLVITSPSNLSDLKECSGSRKARVLYDYDAANSTELSLLADEVITVFSVVGMDSDWLMGERGNQKGKVPITYLELLN

SEQ ID NO: 4151 - protein, 1311 aa, Homo sapiens
MSLLQSALDFLAGPGSLGGASGRDQSDFVGQTVELGELRLRVRRVLAEGGFAFVYEAQDVGSGREYALKRLLSNEEEKNRAIIQEVCFMKKLSGHPNIVQFCSAASIGKEESDTGQAEFLLLTELCKGQLVEFLKKMESRGPLSCDTVLKIFYQTCRAVQHMHRQKPPIIHRDLKVENLLLSNQGTIKLCDFGSATTISHYPDYSWSAQRRALVEEEITRNTTPMYRTPEIIDLYSNFPIGEKQDIWALGCILYLLCFRQHPFEDGAKLRIVNGKYSIPPHDTQYTVFHSLIRAMLQVNPEERLSIAEVVHQLQEIAAARNVNPKSPITELLEQNGGYGSATLSRGPPPPVGPAGSGYSGGLALAEYDQPYGGFLDILRGGTERLFTNLKDTSSKVIQSVANYAKGDLDISYITSRIAVMSFPAEGVESALKNNIEDVRLFLDSKHPGHYAVYNLSPRTYRPSRFHNRVSECGWAARRAPHLHTLYNICRNMHAWLRQDHKNVCVVHCMDGRAASAVAVCSFLCFCRLFSTAEAAVYMFSMKRCPPGIWPSHKRYIEYMCDMVAEEPITPHSKPILVRAVVMTPVPLFSKQRSGCRPFCEVYVGDERVASTSQEYDKMRDFKIEDGKAVIPLGVTVQGDVLIVIYHARSTLGGRLQAKMASMKMFQIQFHTGFVPRNATTVKFAKYDLDACDIQEKYPDLFQVNLEVEVEPRDRPSREAPPWENSSMRGLNPKILFSSREEQQDILSKFGKPELPRQPGSTAQYDAGAGSPEAEPTDSDSPPSSSADASRFLHTLDWQEEKEAETGAENASSKESESALMEDRDESEVSDEGGSPISSEGQEPRADPEPPGLAAGLVQQDLVFEVETPAVLPEPVPQEDGVDLLGLHSEVGAGPAVPPQACKAPSSNTDLLSCLLGPPEAASQGPPEDLLSEDPLLLASPAPPLSVQSTPRGGPPAAADPFGPLLPSSGNNSQPCSNPDLFGEFLNSDSVTVPPSFPSAHSAPPPSCSADFLHLGDLPGEPSKMTASSSNPDLLGGWAAWTETAASAVAPTPATEGPLFSPGGQPAPCGSQASWTKSQNPDPFADLGDLSSGLQGSPAGFPPGGFIPKTATTAKGSSSWQTSRPPAQGASWPPQAKPPPKACTQPRPNYASNFSVIGAREERGVRAPSFAQKPKVSENDFEDLLSNQGFSSRSDKKGPKTIAEMRKQDLAKDTDPLKLKLLDWIEGKERNIRALLSTLHTVLWDGESRWTPVGMADLVAPEQVKKHYRRAVLAVHPDKAAGQPYEQHAKMIFMELNDAWSEFENQGSRPLF

SEQ ID NO: 4152 - protein, 457 aa, Homo sapiens
MAQPPRLSRSGASSLWDPASPAPTSGPRPRLWEGQDVLARWTDGLLYLGTIKKVDSAREVCLVQFEDDSQFLVLWKDISPAALPGEELLCCVCRSETVVPGNRLVSCEKCRHAYHQDCHVPRAPAPGEGEGTSWVCRQCVFAIATKRGGALKKGPYARAMLGMKLSLPYGLKGLDWDAGHLSNRQQSYCYCGGPGEWNLKMLQCRSCLQWFHEACTQCLSKPLLYGDRFYEFECCVCRGGPEKVRRLQLRWVDVAHLVLYHLSVCCKKKYFDFDREILPFTSENWDSLLLGELSDTPKGERSSKLLSALNSHKDRFISGREIKKRKCLFGLHARMPPPVEPPTGDGALTRAGPWGRGLTSPGEAPEAGARAPEEEAEGESGGAGATLSSAQSARAPGAEGAGSSAEGTAAAPSGCLLPSTLLPAPQGPLGTVDPQTGHPWNFTLVSPQTSLKVPPTR

SEQ ID NO: 4153 - protein, 567 aa, Homo sapiens
MAQPPRLSRSGASSLWDPASPAPTSGPRPRLWEGQDVLARWTDGLLYLGTIKKVDSAREVCLVQFEDDSQFLVLWKDISPAALPGEELLCCVCRSETVVPGNRLVSCEKCRHAYHQDCHVPRAPAPGEGEGTSWVCRQCVFAIATKRGGALKKGPYARAMLGMKLSLPYGLKGLDWDAGHLSNRQQSYCYCGGPGEWNLKMLQCRSCLQWFHEACTQCLSKPLLYGDRFYEFECCVCRGGPEKVRRLQLRWVDVAHLVLYHLSVCCKKKYFDFDREILPFTSENWDSLLLGELSDTPKGERSSKLLSALNSHKDRFISGREIKKRKCLFGLHARMPPPVEPPTGDGALTSFPSGQGPGGGVSRPLGKRRRPEPEPLRRRQKGKVEELGPPSAVRNQPEPQEQRERAHLQRALQASVSPPSPSPNQSYQGSSGYNFRPTDARCLPSSPIRMFASFHPSASTAGTSGDSGPPDRSPLELHIGFPTDIPKSAPHSMTASSSSVSSPSPGLPRRSAPPSPLCRSLSPGTGGGVRGGVGYLSRGDPVRVLARRVRPDGSVQYLVEWGGGGIF

SEQ ID NO: 4154 - protein, 314 aa, Homo sapiens
MALAARLWRLLPFRRGAAPGSRLPAGPSGSRGIAAPARFRGFEVMGNPGTFNRGLLLSALSYLGFETYQVISQAAVVHATAKVEEILEQADYLYESGETEKLYQLLTQYKESEDAELLWRLARASRDVAQLSRTSEEEKKLLVYEALEYAKRALEKNESSFASHKWYAICLSDVGDYEGIKAKIANAYIIKEHFEKAIELNPKDATSIHLMGIWCYTFAEMPWYQRRIAKMLFATPPSSTYEKALGYFHRAEQVDPNFYSKNLLLLGKTYLKLHNKKLAAFWLMKAKDYPAHTEEDKQIQTEAAQLLTSFSEKN

SEQ ID NO: 4155 - protein, 356 aa, Homo sapiens
MSRPLLITFTPATDPSDLWKDGQQQPQPEKPESTLDGAAARAFYEALIGDESSAPDSQRSQTEPARERKRKKRRIMKAPAAEAVAEGASGRHGQGRSLEAEDKMTHRILRAAQEGDLPELRRLLEPHEAGGAGGNINARDAFWWTPLMCAARAGQGAAVSYLLGRGAAWVGVCELSGRDAAQLAEEAGFPEVARMVRESHGETRSPENRSPTPSLQYCENCDTHFQDSNHRTSTAHLLSLSQGPQPPNLPLGVPISSPGFKLLLRGGWEPGMGLGPRGEGRANPIPTVLKRDQEGLGYRSAPQPRVTHFPAWDTRAVAGRERPPRVATLSWREERRREEKDRAWERDLRTYMNLEF

SEQ ID NO: 4156 - protein, 700 aa, Homo sapiens
MAGIAAKLAKDREAAEGLGSHERAIKYLNQDYEALRNECLEAGTLFQDPSFPAIPSALGFKELGPYSSKTRGMRWKRPTEICADPQFIIGGATRTDICQGALGDCWLLAAIASLTLNEEILARVVPLNQSFQENYAGIFHFQFWQYGEWVEVVVDDRLPTKDGELLFVHSAEGSEFWSALLEKAYAKINGCYEALSGGATTEGFEDFTGGIAEWYELKKPPPNLFKIIQKALQKGSLLGCSIDITSAADSEAITFQKLVKGHAYSVTGAEEVESNGSLQKLIRIRNPWGEVEWTGRWNDNCPSWNTIDPEERERLTRRHEDGEFWMSFSDFLRHYSRLEICNLTPDTLTSDTYKKWKLTKMDGNWRRGSTAGGCRNYPNTFWMNPQYLIKLEEEDEDEEDGESGCTFLVGLIQKHRRRQRKMGEDMHTIGFGIYEVPEELSGQTNIHLSKNFFLTNRARERSDTFINLREVLNRFKLPPGEYILVPSTFEPNKDGDFCIRVFSEKKADYQAVDDEIEANLEEFDISEDDIDDGVRRLFAQLAGEDAEISAFELQTILRRVLAKRQDIKSDGFSIETCKIMVDMLDSDGSGKLGLKEFYILWTKIQKYQKIYREIDVDRSGTMNSYEMRKALEEAGFKMPCQLHQVIVARFADDQLIIDFDNFVRCLVRLETLFKIFKQLDPENTGTIELDLISWLCFSVL

SEQ ID NO: 4157 - protein, 666 aa, Homo sapiens
MALFYVARYPGPDAAAAAGPEGAEAGAHGRARALLERLQSQARERQQQREPAQTEAAASTEPATRRRRRPRRRRRVNDAEPGSPEAPQGKRRKADGEDAGAESNEEAPGEPSAGSSEEAQGGPSAGSSEEAPGVRSTSASAEAAPDGPALEEAAGPLVPGLVLGGFGKRKAPKVKPFLPRWLAEPNCVRRNVTEDLVPIEDIPDVHPDLQKQLRAHGISSYFPVQAAVIPALLESAACGFLVGRGGYRLSDLCVSAPTGSGKTLAFVIPVVQALLSRVVCHIRALVVLPTKELARQVSKVFNIYTDATPLRVSLVTGQKSLAKEQESLVQKTADGYRCLADIVVATPGRLVDHIDQTPGFSLQQLRFLIIDEADRMIDSMHQSWLPRVVAAAFQSEDPADPCALLKRRQAQAVTAASTCCPQMPLQKLLFSATLTQNPEKLQQLGLHQPRLFSTGLAHRGLEDTDGDGDSGKYAFPVGLTHHYVPCSLSSKPLVVLHLVLEMGFSRVLCFTNSRENSHRLFLLVQAFGGVDVAEFSSRYGPGQRRMILKQFEQGKIQLLISTDATARGIDVQGVELVVNYDAPQYLRTYVHRVGRTARAGKTGQAFTLLLKVQERRFLRMLTEAGAPELQRHELSSKLLQPLVPRYEEALSKLEESVKEERKQRAA

SEQ ID NO: 4158 - protein, 469 aa, Homo sapiens
MMSEHDLADVVQIAVEDLSPDHPVVLENHVVTDEDEPALKRQRLEINCQDPSIKSFLYSINQTICLRLDSIEAKLQALEATCKSLEEKLDLVTNKQHSPIQVPMVAGSPLGATQTCNKVRCAVPGRRQNTIVVKVPGQEDSHHEDGESGSEASDSVSSCGQAGSQSIGSNVTLITLNSEEDYPNGTWLGDENNPEMRVRCAIIPSDMLHISTNCRTAEKMALTLLDYLFHREVQAVSNLSGQGKHGKKQLDPLTIYGIRCHLFYKFGITESDWYRIKQSIDSKCRTAWRRKQRGQSLAVKSFSRRTPNSSSYCPSEPMMSTPPPASELPQPQPQPQALHYALANAQQVQIHQIGEDGQVQVIPQGHLHIAQVPQGEQVQITQDSEGNLQIHHVGQDGQVLQGAQLIAVASSDPAAAGVDGSPLQGSDIQVQYVQLAPVSDHTAGAQTAEALQPTLQPEMQLEHGAIQIQ

SEQ ID NO: 4159 - protein, 466 aa, Homo sapiens
MMSEHDLADVVQIAVEDLSPDHPVVLENHVVTDEDEPALKRQRLEINCQDPSIKSFLYSINQTICLRLDSIEAKLQALEATCKSLEEKLDLVTNKQHSPIQVPMVAGSPLGATQTCNKVRCAVPGRRQNTIVVKVPGQEDSHHEDGESGSEASDSVSSCGQAGSQSIGSNVTLITLNSEEDYPNGTWLGDENNPEMRVRCAIIPSDMLHISTNCRTAEKMALTLLDYLFHREVQAVSNLSGQGKHGKKQLDPLTIYGIRCHLFYKFGITESDWYRIKQSIDSKCRTAWRRKQRGQSLAVKSFSRRTPNSSSYCPSEPMMSTPPPASELPQPQPQPQALHYALANAQQVQIHQIGEDGQVQVGHLHIAQVPQGEQVQITQDSEGNLQIHHVGQDGQVLQGAQLIAVASSDPAAAGVDGSPLQGSDIQVQYVQLAPVSDHTAGAQTAEALQPTLQPEMQLEHGAIQIQ

SEQ ID NO: 4160 - protein, 437 aa, Homo sapiens
MTTSTLQKAIDLVTKATEEDKAKNYEEALRLYQHAVEYFLHAIKYEAHSDKAKESIRAKCVQYLDRAEKLKDYLRSKEKHGKKPVKENQSEGKGSDSDSEGDNPEKKKLQEQLMGAVVMEKPNIRWNDVAGLEGAKEALKEAVILPIKFPHLFTGKRTPWRGILLFGPPGTGKSYLAKAVATEANNSTFFSVSSSDLMSKWLGESEKLVKNLFELARQHKPSIIFIDEVDSLCGSRNENESEAARRIKTEFLVQMQGVGNNNDGTLVLGATNIPWVLDSAIRRRFEKRIYIPLPEEAARAQMFRLHLGSTPHNLTDANIHELARKTEGYSGADISIIVRDSLMQPVRKVQSATHFKKVCGPSRTNPSMMIDDLLTPCSPGDPGAMEMTWMDVPGDKLLEPVVCMSDMLRSLATTRPTVNADDLLKVKKFSEDFGQES

SEQ ID NO: 4161 - protein, 478 aa, Homo sapiens
MAAALKCLLTLGRWCPGLGVAPQARALAALVPGVTQVDNKSGFLQKRPHRQHPGILKLPHVRLPQALANGAQLLLLGSAGPTMENQVQTLTSYLWSRHLPVEPEELQRRARHLEKKFLENPDLSQTEEKLRGAVLHALRKTTYHWQELSYTEGLSLVYMAARLDGGFAAVSRAFHEIRARNPAFQPQTLMDFGSGTGSVTWAAHSIWGQSLREYMCVDRSAAMLVLAEKLLKGGSESGEPYIPGVFFRQFLPVSPKVQFDVVVSAFSLSELPSKADRTEVVQTLWRKTGHFLVLVENGTKAGHSLLMDARDLVLKGKEKSPLDPRPGFVFAPCPHELPCPQLTNLACSFSQAYHPIPFSWNKKPKEEKFSMVILARGSPEEAHRWPRITQPVLKRPRHVHCHLCCPDGHMQHAVLTARRHGRYGGCDQNQWDVAGSCSPRQHLFPQGFVSLCPCQLLGRSFTCAYSVCVSSIYGSGSL

SEQ ID NO: 4162 - protein, 158 aa, Homo sapiens
MAAALKCLLTLGRWCPGLGVAPQARALAALVPGVTQVDNKSGFLQKRPHRQHPGILKLPHVRLPQALANGAQLLLLGSAGPTMENQVQTLTSYLWSRHLPVEPEELQRRARHLEKKFLENPGPDFQSLFSPQTYLRQRRNFVEQCYTHYVKLPTIGKN

SEQ ID NO: 4163 - protein, 456 aa, Homo sapiens
MAAALKCLLTLGRWCPGLGVAPQARALAALVPGVTQVDNKSGFLQKRPHRQHPGILKLPHVRLPQALANGAQLLLLGSAGPTMENQVQTLTSYLWSRHLPVEPEELQRRARHLEKKFLENPDLSQTEEKLRGAVLHALRKTTYHWQELSYTEGLSLVYMAARLDGGFAAVSRAFHEIRARNPAFQPQTLMDFGSGTGSVTWAAHSIWGQSLREYMCVDRSAAMLVLAEKLLKGGSESGEPYIPGVFFRQFLPVSPKVQFDVVVSAFSLSELPSKADRTEVVQTLWRKTGHFLVLVENGTKAGHSLLMDARDLVLKGKEKSPLDPRPGFVFAPCPHELPCPQLTNLACSFSQAYHPIPFSWNKKPKEEKFSMVILARGSPEEAHRWPRITQPVLKRPRHVHCHLCCPDGHMQHAVLTARRHGRDLYRCARVSSWGDLLPVLTPSAFPPSTAQDPSES

SEQ ID NO: 4164 - protein, 952 aa, Homo sapiens
MDLRVGQRPPVEPPPEPTLLALQRPQRLHHHLFLAGLQQQRSVEPMRLSMDTPMPELQVGPQEQELRQLLHKDKSKRSAVASSVVKQKLAEVILKKQQAALERTVHPNSPGIPYRTLEPLETEGATRSMLSSFLPPVPSLPSDPPEHFPLRKTVSEPNLKLRYKPKKSLERRKNPLLRKESAPPSLRRRPAETLGDSSPSSSSTPASGCSSPNDSEHGPNPILGSEALLGQRLRLQETSVAPFALPTVSLLPAITLGLPAPARADSDRRTHPTLGPRGPILGSPHTPLFLPHGLEPEAGGTLPSRLQPILLLDPSGSHAPLLTVPGLGPLPFHFAQSLMTTERLSGSGLHWPLSRTRSEPLPPSATAPPPPGPMQPRLEQLKTHVQVIKRSAKPSEKPRLRQIPSAEDLETDGGGPGQVVDDGLEHRELGHGQPEARGPAPLQQHPQVLLWEQQRLAGRLPRGSTGDTVLLPLAQGGHRPLSRAQSSPAAPASLSAPEPASQARVLSSSETPARTLPFTTGLIYDSVMLKHQCSCGDNSRHPEHAGRIQSIWSRLQERGLRSQCECLRGRKASLEELQSVHSERHVLLYGTNPLSRLKLDNGKLAGLLAQRMFVMLPCGGVGVDTDTIWNELHSSNAARWAAGSVTDLAFKVASRELKNGFAVVRPPGHHADHSTAMGFCFFNSVAIACRQLQQQSKASKILIVDWDVHHGNGTQQTFYQDPSVLYISLHRHDDGNFFPGSGAVDEVGAGSGEGFNVNVAWAGGLDPPMGDPEYLAAFRIVVMPIAREFSPDLVLVSAGFDAAEGHPAPLGGYHVSAKCFGYMTQQLMNLAGGAVVLALEGGHDLTAICDASEACVAALLGNRVDPLSEEGWKQKPNLNAIRSLEAVIRVHSKYWGCMQRLASCPDSWVPRVPGADKEEVEAVTALASLSVGILAEDRPSEQLVEEEEPMNL

SEQ ID NO: 4165 - protein, 912 aa, Homo sapiens
MDLRVGQRPPVEPPPEPTLLALQRPQRLHHHLFLAGLQQQRSVEPMRLSMDTPMPELQVGPQEQELRQLLHKDKSKRSAVASSVVKQKLAEVILKKQQAALERTVHPNSPGIPYRTLEPLETEGATRSMLSSFLPPVPSLPSDPPEHFPLRKTVSEPNLKLRYKPKKSLERRKNPLLRKESAPPSLRRRPAETLGDSSPSSSSTPASGCSSPNDSEHGPNPILGDSDRRTHPTLGPRGPILGSPHTPLFLPHGLEPEAGGTLPSRLQPILLLDPSGSHAPLLTVPGLGPLPFHFAQSLMTTERLSGSGLHWPLSRTRSEPLPPSATAPPPPGPMQPRLEQLKTHVQVIKRSAKPSEKPRLRQIPSAEDLETDGGGPGQVVDDGLEHRELGHGQPEARGPAPLQQHPQVLLWEQQRLAGRLPRGSTGDTVLLPLAQGGHRPLSRAQSSPAAPASLSAPEPASQARVLSSSETPARTLPFTTGLIYDSVMLKHQCSCGDNSRHPEHAGRIQSIWSRLQERGLRSQCECLRGRKASLEELQSVHSERHVLLYGTNPLSRLKLDNGKLAGLLAQRMFVMLPCGGVGVDTDTIWNELHSSNAARWAAGSVTDLAFKVASRELKNGFAVVRPPGHHADHSTAMGFCFFNSVAIACRQLQQQSKASKILIVDWDVHHGNGTQQTFYQDPSVLYISLHRHDDGNFFPGSGAVDEVGAGSGEGFNVNVAWAGGLDPPMGDPEYLAAFRIVVMPIAREFSPDLVLVSAGFDAAEGHPAPLGGYHVSAKCFGYMTQQLMNLAGGAVVLALEGGHDLTAICDASEACVAALLGNRVDPLSEEGWKQKPNLNAIRSLEAVIRVHSKYWGCMQRLASCPDSWVPRVPGADKEEVEAVTALASLSVGILAEDRPSEQLVEEEEPMNL

SEQ ID NO: 4166 - protein, 1704 aa, Homo sapiens
MSSVSEVNVDIKDFLMSINLEQYLLHFHESGFTTVKDCAAINDSLLQKIGISPTGHRRRILKQLQIILSKMQDIPIYANVHKTKKNDDPSKDYHVPSSDQNICIELSNSGSVQTSSPPQLETVRKNLEDSDASVERSQYPQSDDKLSPPKRDFPTAEEPHLNLGSLNDSLFGSDNIKIESLITKKTVDHTVEEQQTEKVKLITENLSKLPNADSECLSFVGCSTSGTNSGNGTNGLLEGSPPSPFFKFQGEMIVNDLYVPSSPILAPVRSRSKLVSRPSRSFLLRHRPVPEIPGSTKGVSGSYFRERRNVATSTEKSVAWQNSNEENSSSIFPYGETFLFQRLENSKKRSIKNEFLTQGEALKGEAATATNSFIIKSSIYDNRKEKISEDKVEDIWIPREDKNNFLIDTASESEYSTVEECFQSLRRKNSKASKSRTQKALILDSVNRHSYPLSSTSGNADSSAVSSQAISPYACFYGASAKKVKSGWLDKLSPQGKRMFQKRWVKFDGLSISYYNNEKEMYSKGIIPLSAISTVRVQGDNKFEVVTTQRTFVFRVEKEEERNDWISILLNALKSQSLTSQSQAVVTPEKCGYLELRGYKAKIFTVLSGNSVWLCKNEQDFKSGLGITIIPMNVANVKQVDRTVKQSFEIITPYRSFSFTAETEKEKQDWIEAVQQSIAETLSDYEVAEKIWFNESNRSCADCKAPDPDWASINLCVVICKKCAGQHRSLGPKDSKVRSLKMDASIWSNELIELFIVIGNKRANDFWAGNLQKDEELHMDSPVEKRKNFITQKYKEGKFRKTLLASLTKEELNKALCAAVVKPDVLETMALLFSGADVMCATGDPVHSTPYLLAKKAGQSLQMEFLYHNKFSDFPQHDIHSEGVLSQESSQSTFLCDFLYQAPSAASKLSSEKKLLEETNKKWCVLEGGFLSYYENDKSTTPNGTININEVICLAIHKEDFYLNTGPIFIFEIYLPSERVFLFGAETSQAQRKWTEAIAKHFVPLFAENLTEADYDLIGQLFYKDCHALDQWRKGWFAMDKSSLHFCLQMQEVQGDRMHLRRLQELTISTMVQNGEKLDVLLLVEKGRTLYIHGHTKLDFTVWHTAIEKAAGTDGNALQDQQLSKNDVPIIVNSCIAFVTQYGLGCKYIYQKNGDPLHISELLESFKKDARSFKLRAGKHQLEDVTAVLKSFLSDIDDALLTKELYPYWISALDTQDDKERIKKYGAFIRSLPGVNRATLAAIIEHLYRVQKCSEINHMNAHNLALVFSSCLFQTKGQTSEEVNVIEDLINNYVEIFEVKEDQVKQMDIENSFITKWKDTQVSQAGDLLIEVYVERKEPDCSIIIRISPVMEAEELTNDILAIKNIIPTKGDIWATFEVIENEELERPLHYKENVLEQVLRWSSLAEPGSAYLVVKRFLTADTIKHCSDRSTLGSIKEGILKIKEEPSKILSGNKFQDRYFVLRDGFLFLYKDVKSSKHDKMFSLSSMKFYRGVKKKMKPPTSWGLTAYSEKHHWHLCCDSSRTQTEWMTSIFIAQHEYDIWPPAGKERKRSITKNPKIGGLPLIPIQHEGNATLARKNIESARAELERLRLSEKCDKESVDSSLKERASMVAHCLEHKDDKLRNRPRKHRSFNCLEDTEPEAPLGQPKGHKGLKTLRKTEDRNSKATLDSDHKLPSRVIEELNVVLQRSRTLPKELQDEQILK

SEQ ID NO: 4167 - protein, 876 aa, Homo sapiens
MALLFSGADVMCATGDPVHSTPYLLAKKAGQSLQMEFLYHNKFSDFPQHDIHSEGVLSQESSQSTFLCDFLYQAPSAASKLSSEKKLLEETNKKWCVLEGGFLSYYENDKSTTPNGTININEVICLAIHKEDFYLNTGPIFIFEIYLPSERVFLFGAETSQAQRKWTEAIAKHFVPLFAENLTEADYDLIGQLFYKDCHALDQWRKGWFAMDKSSLHFCLQMQEVQGDRMHLRRLQELTISTMVQNGEKLDVLLLVEKGRTLYIHGHTKLDFTVWHTAIEKAAGTDGNALQDQQLSKNDVPIIVNSCIAFVTQYGLGCKYIYQKNGDPLHISELLESFKKDARSFKLRAGKHQLEDVTAVLKSFLSDIDDALLTKELYPYWISALDTQDDKERIKKYGAFIRSLPGVNRATLAAIIEHLYRVQKCSEINHMNAHNLALVFSSCLFQTKGQTSEEVNVIEDLINNYVEIFEVKEDQVKQMDIENSFITKWKDTQVSQAGDLLIEVYVERKEPDCSIIIRISPVMEAEELTNDILAIKNIIPTKGDIWATFEVIENEELERPLHYKENVLEQVLRWSSLAEPGSAYLVVKRFLTADTIKHCSDRSTLGSIKEGILKIKEEPSKILSGNKFQDRYFVLRDGFLFLYKDVKSSKHDKMFSLSSMKFYRGVKKKMKPPTSWGLTAYSEKHHWHLCCDSSRTQTEWMTSIFIAQHEYDIWPPAGKERKRSITKNPKIGGLPLIPIQHEGNATLARKNIESARAELERLRLSEKCDKESVDSSLKERASMVAHCLEHKDDKLRNRPRKHRSFNCLEDTEPEAPLGQPKGHKGLKTLRKTEDRNSKATLDSDHKLPSRVIEELNVVLQRSRTLPKELQDEQILK

SEQ ID NO: 4168 - protein, 587 aa, Homo sapiens
MAAAVAVAAASRRQSCYLCDLPRMPWAMIWDFTEPVCRGCVNYEGADRVEFVIETARQLKRAHGCFPEGRSPPGAAASAAAKPPPLSAKDILLQQQQQLGHGGPEAAPRAPQALERYPLAAAAERPPRLGSDFGSSRPAASLAQPPTPQPPPVNGILVPNGFSKLEEPPELNRQSPKPRRGHTVPPTLVPLMNGSATPLPTALGLGGRAAASLAAVSGTAAASLGSAQPTDLGAHKRPASVSSSATVEHEQREAAAKEKQPPPPAHRGPADSLSTAAGAAELSAEGAGKSRGSGEQDWVNRPKTVRDTLLALHQHGHSGPFESKFKKEPALTAGRLLGFEANGANGSKAVARTARKRKPSPEPEGEVGPPKINGEAQPWLSTSTEGLKIPMTPTSSFVSPPPPTASPHSNRTTPPEAAQNGQSPMAALILVADNAGGSHASKDANQVHSTTRRNSNSPPSPSSMNQRRLGPREVGGQGAGNTGGLEPVHPASLPDSSLATSAPLCCTLCHERLEDTHFVQCPSVPSHKFCFPCSRQSIKQQGASGEVYCPSGEKCPLVGSNVPWAFMQGEIATILAGDVKVKKERDS

SEQ ID NO: 4169 - protein, 101 aa, Homo sapiens
MVVSKMNKDAQMRAAINQKLIETGERERLKELLRAKLIECGWKDQLKAHCKEVIKEKGLEHVTVDDLVAEITPKGRALVPDSVKKELLQRIRTFLAQHASL

SEQ ID NO: 4170 - protein, 299 aa, Homo sapiens
MEEFDSEDFSTSEEDEDYVPSGGEYSEDDVNELVKEDEVDGEEQTQKTQGKKRKAQSIPARKRRQGGLSLEEEEEEDANSESEGSSSEEEDDAAEQEKGIGSEDARKKKEDELWASFLNDVGPKSKVPPSTQVKKGEETEETSSSKLLVKAEELEKPKETEKVKITKVFDFAGEEVRVTKEVDATSKEAKSFFKQNEKEKPQANVPSALPSLPAGSGLKRSSGMSSLLGKIGAKKQKMSTLEKSKLDWESFKEEEGIGEELAIHNRGKEGYIERKAFLDRVDHRQFEIERDLRLSKMKP

SEQ ID NO: 4171 - protein, 298 aa, Homo sapiens
MTSLTQRSSGLVQRRTEASRNAADKERAAGGGAGSSEDDAQSRRDEQDDDDKGDSKETRLTLMEEVLLLGLKDREGYTSFWNDCISSGLRGCMLIELALRGRLQLEACGMRRKSLLTRKVICKSDAPTGDVLLDEALKHVKETQPPETVQNWIELLSGETWNPLKLHYQLRNVRERLAKNLVEKGVLTTEKQNFLLFDMTTHPLTNNNIKQRLIKKVQEAVLDKWVNDPHRMDRRLLALIYLAHASDVLENAFAPLLDEQYDLATKRVRQLLDLDPEVECLKANTNEVLWAVVAAFTK

SEQ ID NO: 4172 - protein, 908 aa, Homo sapiens
MEPDIIRMYSSSPPPLDNGAEDDDDDEFGEFGGFSEVSPSGVGFVDFDTPDYTRPKEEFVPSNHFMPIHEFSENVDSLTSFKSIKNGNDKDITAELSAPVKGQSDVLLSTTSKEIISSEMLATSIDGMERPGNLNKVVEQRQNVGTLESFSPGDFRTNMNVVHQNKQLESCNGEKPPCLEILTNGFAVLETVNPQGTDDLDNVADSKGRKPLSTHSTEYNLDSVPSPAEEFADFATFSKKERIQLEEIECAVLNDREALTIRENNKINRVNELNSVKEVALGRSLDNKGDTDGEDQVCVSEISIVTNRGFSVEKQGLPTLQQDEFLQSGVQSKAWSLVDSADNSEAIRREQCKTEEKLDLLTSKCAHLCMDSVKTSDDEVGSPKEESRKFTNFQSPNIDPTEENDLDDSLSVKNGDSSNDFVTCNDINEDDFGDFGDFGSASGSTPPFVTGTQDSMSDATFEESSEHFPHFSEPGDDFGEFGDINAVSCQEETILTKSDLKQTSDNLSEECQLARKSSGTGTEPVAKLKNGQEGEIGHFDSVPNIQDDCNGFQDSDDFADFSSAGPSQVVDWNAFEDEQKDSCSWAAFGDQQATESHHRKEAWQSHRTDENIDTPGTPKTHSVPSATSKGAVASGHLQESATSVQTALLNRLERIFEACFPSILVPDAEEEVTSLKHLLETSTLPIKTREALPESGELLDVWTELQDIHDAHGLRYQWGGSHSNKKLLSSLGIDTRNILFTGNKKQPVIVPMYAAGLGMLEPTKEPLKPLSAAEKIASIGQTATMSPDMNTCTSDQFQESLPPVQFDWSSSGLTNPLDGVDPELYELTTSKLEISTSSLKVTDAFARLMSTVEKTSTSTRKPKREEHLSEEAIKVIAGLPDLTFMHAKVLMFPATLTPSTSSQEKADG

SEQ ID NO: 4173 - protein, 909 aa, Homo sapiens
MEPDIIRMYSSSPPPLDNGAEDDDDDEFGEFGGFSEVSPSGVGFVDFDTPDYTRPKEEFVPSNHFMPIHEFSENVDSLTSFKSIKNGNDKDITAELSAPVKGQSDVLLSTTSKEIISSEMLATSIDGMERPGNLNKVVEQRQNVGTLESFSPGDFRTNMNVVHQNKQLESCNGEKPPCLEILTNGFAVLETVNPQGTDDLDNVADSKGRKPLSTHSTEYNLDSVPSPAEEFADFATFSKKERIQLEEIECAVLNDREALTIRENNKINRVNELNSVKEVALGRSLDNKGDTDGEDQVCVSEISIVTNRGFSVEKQGLPTLQQDEFLQSGVQSKAWSLVDSADNSEAIRREQCKTEEKLDLLTSKCAHLCMDSVKTSDDEVGSPKEESRKFTNFQSPNIDPTEENDLDDSLSVKNGDSSNDFVTCNDINEDDFGDFGDFGSASGSTPPFVTGTQDSMSDATFEESSEHFPHFSEPGDDFGEFGDINAVSCQEETILTKSDLKQTSDNLSEECQLARKSSGTGTEPVAKLKNGQEGEIGHFDSVPNIQDDCNGFQDSDDFADFSSAGPSQVVDWNAFEDEQKDSCSWAAFGDQQATESHHRKEAWQSHRTDENIDTPGTPKTHSVPSATSKGAVASGHLQESATSVQTALLNRLERIFEACFPSILVPDAEEEVTSLKHLLETSTLPIKTREALPESGELLDVWTELQDIHDAHGLRYQWGGSHSNKKLLSSLGIDTRNILFTGNKKQPVIVPMYAAGLGMLEPTKEPLKPLSAAEKIASIGQTATMSPDMNTCTSDQFQESLPPVQFDWSSSGLTNPLDGVDPELYELTTSKLEISTSSLKVTDAFARLMSTVEKTSTSTSRKPKREEHLSEEAIKVIAGLPDLTFMHAKVLMFPATLTPSTSSQEKADG

SEQ ID NO: 4174 - protein, 936 aa, Homo sapiens
MEPDIIRMYSSSPPPLDNGAEDDDDDEFGEFGGFSEVSPSGVGFVDFDTPDYTRPKEEFVPSNHFMPIHEFSENVDSLTSFKSIKNGNDKDITAELSAPVKGQSDVLLSTTSKEIISSEMLATSIDGMERPGNLNKVVEQRQNVGTLESFSPGDFRTNMNVVHQNKQLESCNGEKPPCLEILTNGFAVLETVNPQGTDDLDNVADSKGRKPLSTHSTEYNLDSVPSPAEEFADFATFSKKERIQLEEIECAVLNDREALTIRENNKINRVNELNSVKEVALGRSLDNKGDTDGEDQVCVSEISIVTNRGFSVEKQGLPTLQQDEFLQSGVQSKAWSLVDSADNSEAIRREQCKTEEKLDLLTSKCAHLCMDSVKTSDDEVGSPKEESRKFTNFQSPNIDPTEENDLDDSLSVKNGDSSNDFVTCNDINEDDFGDFGDFGSASGSTPPFVTGTQDSMSDATFEESSEHFPHFSEPGDDFGEFGDINAVSCQEETILTKSDLKQTSDNLSEECQLARKSSGTGTEPVAKLKNGQEGEIGHFDSVPNIQDDCNGFQDSDDFADFSSAGPSQVVDWNAFEDEQKDSCSWAAFGDQQATESHHRKEAWQSHRTDENIDTPGTPKTHSVPSATSKGAVASGHLQESATSVQTALLNRLERIFEACFPSILVPDAEEEVTSLKHLLETSTLPIKTREALPESGELLDVWTELQDIHDAHGLRYQWGGSHSNKKLLSSLGIDTRNILFTGNKKQPVIVPMYAAGLGMLEPTKEPLKPLSAAEKIASIGQTATMSPDMNTCTSDQFQESLPPVQFDWSSSGLTNPLDASGGSTLLNLDFFGPVDDSSSSSSTTIPGVDPELYELTTSKLEISTSSLKVTDAFARLMSTVEKTSTSTRKPKREEHLSEEAIKVIAGLPDLTFMHAKVLMFPATLTPSTSSQEKADG

SEQ ID NO: 4175 - protein, 820 aa, Homo sapiens
MALLRDVSLQDPRDRFELLQRVGAGTYGDVYKARDTVTSELAAVKIVKLDPGDDISSLQQEITILRECRHPNVVAYIGSYLRNDRLWICMEFCGGGSLQEIYHATGPLEERQIAYVCREALKGLHHLHSQGKIHRDIKGANLLLTLQGDVKLADFGVSGELTASVAKRRSFIGTPYWMAPEVAAVERKGGYNELCDVWALGITAIELGELQPPLFHLHPMRALMLMSKSSFQPPKLRDKTRWTQNFHHFLKLALTKNPKKRPTAEKLLQHPFTTQQLPRALLTQLLDKASDPHLGTPSPEDCELETYDMFPDTIHSRGQHGPAERTPSEIQFHQVKFGAPRRKETDPLNEPWEEEWTLLGKEELSGSLLQSVQEALEERSLTIRSASEFQELDSPDDTMGTIKRAPFLGPLPTDPPAEEPLSSPPGTLPPPPSGPNSSPLLPTAWATMKQREDPERSSCHGLPPTPKVHMGACFSKVFNGCPLRIHAAVTWIHPVTRDQFLVVGAEEGIYTLNLHELHEDTLEKLISHRCSWLYCVNNVLLSLSGKSTHIWAHDLPGLFEQRRLQQQVPLSIPTNRLTQRIIPRRFALSTKIPDTKGCLQCRVVRNPYTGATFLLAALPTSLLLLQWYEPLQKFLLLKNFSSPLPSPAGMLEPLVLDGKELPQVCVGAEGPEGPGCRVLFHVLPLEAGLTPDILIPPEGIPGSAQQVIQVDRDTILVSFERCVRIVNMQGEPTATLAPELTFDFPIETVVCLQDSVLAFWSHGMQGRSLDTNEVTQEITDETRIFRVLGAHRDIILESIPTDNPEAHSNLYILTGHQSTY

SEQ ID NO: 4176 - protein, 744 aa, Homo sapiens
MPEDQAGAAMEEASPYSLLDICLNFLTTHLEKFCSARQDGTLCLQEPGVFPQEVADRLLRTMAFHGLLNDGTVGIFRGNQMRLKRACIRKAKISAVAFRKAFCHHKLVELDATGVNADITITDIISGLGSNKWIQQNLQCLVLNSLTLSLEDPYERCFSRLSGLRALSITNVLFYNEDLAEVASLPRLESLDISNTSITDITALLACKDRLKSLTMHHLKCLKMTTTQILDVVRELKHLNHLDISDDKQFTSDIALRLLEQKDILPNLVSLDVSGRKHVTDKAVEAFIQQRPSMQFVGLLATDAGYSEFLTGEGHLKVSGEANETQIAEALKRYSERAFFVREALFHLFSLTHVMEKTKPEILKLVVTGMRNHPMNLPVQLAASACVFNLTKQDLAAGMPVRLLADVTHLLLKAMEHFPNHQQLQKNCLLSLCSDRILQDVPFNRFEAAKLVMQWLCNHEDQNMQRMAVAIISILAAKLSTEQTAQLGTELFIVRQLLQIVKQKTNQNSVDTTLKFTLSALWNLTDESPTTCRHFIENQGLELFMRVLESFPTESSIQQKVLGLLNNIAEVQELHSELMWKDFIDHISSLLHSVEVEVSYFAAGIIAHLISRGEQAWTLSRSQRNSLLDDLHSAILKWPTPECEMVAYRSFNPFFPLLGCFTTPGVQLWAVWAMQHVCSKNPSRYCSMLIEEGGLQHLYNIKDHEHTDPHVQQIAVAILDSLEKHIVRHGRPPPCKKQPQARLN

SEQ ID NO: 4177 - protein, 1143 aa, Homo sapiens
MPPPRTREGRDRRDHHRAPSEEEALEKWDWNCPETRRLLEDAFFREEDYIRQGSEECQKFWTFFERLQRFQNLKTSRKEEKDPGQPKHSIPALADLPRTYDPRYRINLSVLGPATRGSQGLGRHLPAERVAEFRRALLHYLDFGQKQAFGRLAKLQRERAALPIAQYGNRILQTLKEHQVVVVAGDTGCGKSTQVPQYLLAAGFSHVACTQPRRIACISLAKRVGFESLSQYGSQVGYQIRFESTRSAATKIVFLTVGLLLRQIQREPSLPQYEVLIVDEVHERHLHNDFLLGVLQRLLPTRPDLKVILMSATINISLFSSYFSNAPVVQVPGRLFPITVVYQPQEAEPTTSKSEKLDPRPFLRVLESIDHKYPPEERGDLLVFLSGMAEISAVLEAAQTYASHTQRWVVLPLHSALSVADQDKVFDVAPPGVRKCILSTNIAETSVTIDGIRFVVDSGKVKEMSYDPQAKLQRLQEFWISQASAEQRKGRAGRTGPGVCFRLYAESDYDAFAPYPVPEIRRVALDSLVLQMKSMSVGDPRTFPFIEPPPPASLETAILYLRDQGALDSSEALTPIGSLLAQLPVDVVIGKMLILGSMFSLVEPVLTIAAALSVQSPFTRSAQSSPECAAARRPLESDQGDPFTLFNVFNAWVQVKSERSRNSRKWCRRRGIEEHRLYEMANLRRQFKELLEDHGLLAGAQAAQVGDSYSRLQQRRERRALHQLKRQHEEGAGRRRKVLRLQEEQDGGSSDEDRAGPAPPGASDGVDIQDVKFKLRHDLAQLQAAASSAQDLSREQLALLKLVLGRGLYPQLAVPDAFNSSRKDSDQIFHTQAKQGAVLHPTCVFAGSPEVLHAQELEASNCDGSRDDKDKMSSKHQLLSFVSLLETNKPYLVNCVRIPALQSLLLFSRSLDTNGDCSRLVADGWLELQLADSESAIRLLAASLRLRARWESALDRQLAHQAQQQLEEEEEDTPVSPKEVATLSKELLQFTASKIPYSLRRLTGLEVQNMYVGPQTIPATPHLPGLFGSSTLSPHPTKGGYAVTDFLTYNCLTNDTDLYSDCLRTFWTCPHCGLHAPLTPLERIAHENTCPQAPQDGPPGAEEAALETLQKTSVLQRPYHCEACGKDFLFTPTEVLRHRKQHV

SEQ ID NO: 4178 - protein, 883 aa, Homo sapiens
MPPPRTREGRDRRDHHRAPSEEEALEKWDWNCPETRRLLEDAFFREEDYIRQGSEECQKFWTFFERLQRFQNLKTSRKEEKDPGQPKHSIPALADLPRTYDPRYRINLSVLGPATRGSQGLGRHLPAERVAEFRRALLHYLDFGQKQAFGRLAKLQRERAALPIAQYGNRILQTLKEHQVVVVAGDTGCGKSTQVPQYLLAAGFSHVACTQPRRIACISLAKRVGFESLSQYGSQVGYQIRFESTRSAATKIVFLTVGLLLRQIQREPSLPQYEVLIVDEVHERHLHNDFLLGVLQRLLPTRPDLKVILMSATINISLFSSYFSNAPVVQVPGRLFPITVVYQPQEAEPTTSKSEKLDPRPFLRVLESIDHKYPPEERGDLLVFLSGMAEISAVLEAAQTYASHTQRWVVLPLHSALSVADQDKVFDVAPPGVRKCILSTNIAETSVTIDGIRFVVDSGKVKEMSYDPQAKLQRLQEFWISQASAEQRKGRAGRTGPGVCFRLYAESDYDAFAPYPVPEIRRVALDSLVLQMKSMSVGDPRTFPFIEPPPPASLETAILYLRDQGALDSSEALTPIGSLLAQLPVDVVIGKMLILGSMFSLVEPVLTIAAALSVQSPFTRSAQSSPECAAARRPLESDQGDPFTLFNVFNAWVQVKSERSRNSRKWCRRRGIEEHRLYEMANLRRQFKELLEDHGLLAGAQAAQVGDSYSRLQQRRERRALHQLKRQHEEGAGRRRKVLRLQEEQDGGSSDEDRAGPAPPGASDGVDIQDVKFKLRHDLAQLQAAASSAQDLSREQLALLKLVLGRGLYPQLAVPDAFNSSRKDSDQIFHTQAKQGAVLHPTCVFAGSPEVLHAQELEASNCDGSRGMAACWESHSDLADLLV

SEQ ID NO: 4179 - protein, 836 aa, Homo sapiens
MARLGNCSLTWAALIILLLPGSLEECGHISVSAPIVHLGDPITASCIIKQNCSHLDPEPQILWRLGAELQPGGRQQRLSDGTQESIITLPHLNHTQAFLSCCLNWGNSLQILDQVELRAGYPPAIPHNLSCLMNLTTSSLICQWEPGPETHLPTSFTLKSFKSRGNCQTQGDSILDCVPKDGQSHCCIPRKHLLLYQNMGIWVQAENALGTSMSPQLCLDPMDVVKLEPPMLRTMDPSPEAAPPQAGCLQLCWEPWQPGLHINQKCELRHKPQRGEASWALVGPLPLEALQYELCGLLPATAYTLQIRCIRWPLPGHWSDWSPSLELRTTERAPTVRLDTWWRQRQLDPRTVQLFWKPVPLEEDSGRIQGYVVSWRPSGQAGAILPLCNTTELSCTFHLPSEAQEVALVAYNSAGTSRPTPVVFSESRGPALTRLHAMARDPHSLWVGWEPPNPWPQGYVIEWGLGPPSASNSNKTWRMEQNGRATGFLLKENIRPFQLYEIIVTPLYQDTMGPSQHVYAYSQEMAPSHAPELHLKHIGKTWAQLEWVPEPPELGKSPLTHYTIFWTNAQNQSFSAILNASSRGFVLHGLEPASLYHIHLMAASQAGATNSTVLTLMTLTPEGSELHIILGLFGLLLLLTCLCGTAWLCCSPNRKNPLWPSVPDPAHSSLGSWVPTIMEEDAFQLPGLGTPPITKLTVLEEDEKKPVPWESHNSSETCGLPTLVQTYVLQGDPRAVSTQPQSQSGTSDQVLYGQLLGSPTSPGPGHYLRCDSTQPLLAGLTPSPKSYENLWFQASPLGTLVTPAPSQEDDCVFGPLLNFPLLQGIRVHGMEALGSF

SEQ ID NO: 4180 - protein, 769 aa, Homo sapiens
MARLGNCSLTWAALIILLLPGSLEECGHISVSAPIVHLGDPITASCIIKQNCSHLDPEPQILWRLGAELQPGGRQQRLSDGTQESIITLPHLNHTQAFLSCCLNWGNSLQILDQVELRAGYPPAIPHNLSCLMNLTTSSLICQWEPGPETHLPTSFTLKSFKSRGNCQTQGDSILDCVPKDGQSHCCIPRKHLLLYQNMGIWVQAENALGTSMSPQLCLDPMDVVKLEPPMLRTMDPSPEAAPPQAGCLQLCWEPWQPGLHINQKCELRHKPQRGEASWALVGPLPLEALQYELCGLLPATAYTLQIRCIRWPLPGHWSDWSPSLELRTTERAPTVRLDTWWRQRQLDPRTVQLFWKPVPLEEDSGRIQGYVVSWRPSGQAGAILPLCNTTELSCTFHLPSEAQEVALVAYNSAGTSRPTPVVFSESRGPALTRLHAMARDPHSLWVGWEPPNPWPQGYVIEWGLGPPSASNSNKTWRMEQNGRATGFLLKENIRPFQLYEIIVTPLYQDTMGPSQHVYAYSQEMAPSHAPELHLKHIGKTWAQLEWVPEPPELGKSPLTHYTIFWTNAQNQSFSAILNASSRGFVLHGLEPASLYHIHLMAASQAGATNSTVLTLMTLTPAGRIPSGQVSQTQLTAAWAPGCPQSWRRMPSSCPALARHPSPSSQCWRRMKRSRCPGSPITAQRPVASPLWSRPMCSRGTQEQFPPSPNPSLAPAIRSFMGSCWAAPQAQGQGTISAVTPLSPSWRASPPAPSPMRTSGSRPAPWGPW

SEQ ID NO: 4181 - protein, 863 aa, Homo sapiens
MARLGNCSLTWAALIILLLPGSLEECGHISVSAPIVHLGDPITASCIIKQNCSHLDPEPQILWRLGAELQPGGRQQRLSDGTQESIITLPHLNHTQAFLSCCLNWGNSLQILDQVELRAGYPPAIPHNLSCLMNLTTSSLICQWEPGPETHLPTSFTLKSFKSRGNCQTQGDSILDCVPKDGQSHCCIPRKHLLLYQNMGIWVQAENALGTSMSPQLCLDPMDVVKLEPPMLRTMDPSPEAAPPQAGCLQLCWEPWQPGLHINQKCELRHKPQRGEASWALVGPLPLEALQYELCGLLPATAYTLQIRCIRWPLPGHWSDWSPSLELRTTERAPTVRLDTWWRQRQLDPRTVQLFWKPVPLEEDSGRIQGYVVSWRPSGQAGAILPLCNTTELSCTFHLPSEAQEVALVAYNSAGTSRPTPVVFSESRGPALTRLHAMARDPHSLWVGWEPPNPWPQGYVIEWGLGPPSASNSNKTWRMEQNGRATGFLLKENIRPFQLYEIIVTPLYQDTMGPSQHVYAYSQEMAPSHAPELHLKHIGKTWAQLEWVPEPPELGKSPLTHYTIFWTNAQNQSFSAILNASSRGFVLHGLEPASLYHIHLMAASQAGATNSTVLTLMTLTPEGSELHIILGLFGLLLLLTCLCGTAWLCCSPNRKNPLWPSVPDPAHSSLGSWVPTIMEELPGPRQGQWLGQTSEMSRALTPHPCVQDAFQLPGLGTPPITKLTVLEEDEKKPVPWESHNSSETCGLPTLVQTYVLQGDPRAVSTQPQSQSGTSDQVLYGQLLGSPTSPGPGHYLRCDSTQPLLAGLTPSPKSYENLWFQASPLGTLVTPAPSQEDDCVFGPLLNFPLLQGIRVHGMEALGSF

SEQ ID NO: 4182 - protein, 783 aa, Homo sapiens
MARLGNCSLTWAALIILLLPGSLEECGHISVSAPIVHLGDPITASCIIKQNCSHLDPEPQILWRLGAELQPGGRQQRLSDGTQESIITLPHLNHTQAFLSCCLNWGNSLQILDQVELRAGYPPAIPHNLSCLMNLTTSSLICQWEPGPETHLPTSFTLKSFKSRGNCQTQGDSILDCVPKDGQSHCCIPRKHLLLYQNMGIWVQAENALGTSMSPQLCLDPMDVVKLEPPMLRTMDPSPEAAPPQAGCLQLCWEPWQPGLHINQKCELRHKPQRGEASWALVGPLPLEALQYELCGLLPATAYTLQIRCIRWPLPGHWSDWSPSLELRTTERAPTVRLDTWWRQRQLDPRTVQLFWKPVPLEEDSGRIQGYVVSWRPSGQAGAILPLCNTTELSCTFHLPSEAQEVALVAYNSAGTSRPTPVVFSESRGPALTRLHAMARDPHSLWVGWEPPNPWPQGYVIEWGLGPPSASNSNKTWRMEQNGRATGFLLKENIRPFQLYEIIVTPLYQDTMGPSQHVYAYSQEMAPSHAPELHLKHIGKTWAQLEWVPEPPELGKSPLTHYTIFWTNAQNQSFSAILNASSRGFVLHGLEPASLYHIHLMAASQAGATNSTVLTLMTLTPEGSELHIILGLFGLLLLLTCLCGTAWLCCSPNRKNPLWPSVPDPAHSSLGSWVPTIMEEDAFQLPGLGTPPITKLTVLEEDEKKPVPWESHNSSETCGLPTLVQTYVLQGDPRAVSTQPQSQSGTSDQAGPPRRSAYFKDQIMLHPAPPNGLLCLFPITSVL

SEQ ID NO: 4183 - protein, 747 aa, Homo sapiens
MEIPNPPTSKCITYWKRKVKSEYMRLRQLKRLQANMGAKALYVANFAKVQEKTQILNEEWKKLRVQPVQSMKPVSGHPFLKKCTIESIFPGFASQHMLMRSLNTVALVPIMYSWSPLQQNFMVEDETVLCNIPYMGDEVKEEDETFIEELINNYDGKVHGEEEMIPGSVLISDAVFLELVDALNQYSDEEEEGHNDTSDGKQDDSKEDLPVTRKRKRHAIEGNKKSSKKQFPNDMIFSAIASMFPENGVPDDMKERYRELTEMSDPNALPPQCTPNIDGPNAKSVQREQSLHSFHTLFCRRCFKYDCFLHPFHATPNVYKRKNKEIKIEPEPCGTDCFLLLEGAKEYAMLHNPRSKCSGRRRRRHHIVSASCSNASASAVAETKEGDSDRDTGNDWASSSSEANSRCQTPTKQKASPAPPQLCVVEAPSEPVEWTGAEESLFRVFHGTYFNNFCSIARLLGTKTCKQVFQFAVKESLILKLPTDELMNPSQKKKRKHRLWAAHCRKIQLKKDNSSTQVYNYQPCDHPDRPCDSTCPCIMTQNFCEKFCQCNPDCQNRFPGCRCKTQCNTKQCPCYLAVRECDPDLCLTCGASEHWDCKVVSCKNCSIQRGLKKHLLLAPSDVAGWGTFIKESVQKNEFISEYCGELISQDEADRRGKVYDKYMSSFLFNLNNDFVVDATRKGNKIRFANHSVNPNCYAKVVMVNGDHRIGIFAKRAIQAGEELFFDYRYSQADALKYVGIERETDVL

SEQ ID NO: 4184 - protein, 770 aa, Homo sapiens
MDFSKFLADDFDVKEWINAAFRAGSKEAASGKADGHAATLVMKLQLFIQEVNHAVEETSHQALQNMPKVLRDVEALKQEASFLKEQMILVKEDIKKFEQDTSQSMQVLVEIDQVKSRMQLAAESLQEADKWSTLSADIEETFKTQDIAVISAKLTGMQNSLMMLVDTPDYSEKCVHLEALKNRLEALASPQIVAAFTSQAVDQSKVFVKVFTEIDRMPQLLAYYYKCHKVQLLAAWQELCQSDLSLDRQLTGLYDALLGAWHTQIQWATQVFQKPHEVVMVLLIQTLGALMPSLPSCLSNGVERAGPEQELTRLLEFYDATAHFAKGLEMALLPHLHEHNLVKVTELVDAVYDPYKPYQLKYGDMEESNLLIQMSAVPLEHGEVIDCVQELSHSVNKLFGLASAAVDRCVRFTNGLGTCGLLSALKSLFAKYVSDFTSTLQSIRKKCKLDHIPPNSLFQEDWTAFQNSIRIIATCGELLRHCGDFEQQLANRILSTAGKYLSDSCSPRSLAGFQESILTDKKNSAKNPWQEYNYLQKDNPAEYASLMEILYTLKEKGSSNHNLLAAPRAALTRLNQQAHQLAFDSVFLRIKQQLLLISKMDSWNTAGIGETLTDELPAFSLTPLEYISNIGQYIMSLPLNLEPFVTQEDSALELALHAGKLPFPPEQGDELPELDNMADNWLGSIARATMQTYCDAILQIPELSPHSAKQLATDIDYLINVMDALGLQPSRTLQHIVTLLKTRPEDYRQVSKGLPRRLATTVATMRSVNY

SEQ ID NO: 4185 - protein, 4861 aa, Homo sapiens
MATMIPPVKLKWLEHLNSSWITEDSESIATREGVAVLYSKLVSNKEVVPLPQQVLCLKGPQLPDFERESLSSDEQDHYLDALLSSQLALAKMVCSDSPFAGALRKRLLVLQRVFYALSNKYHDKGKVKQQQHSPESSSGSADVHSVSERPRSSTDALIEMGVRTGLSLLFALLRQSWMMPVSGPGLSLCNDVIHTAIEVVSSLPPLSLANESKIPPMGLDCLSQVTTFLKGVTIPNSGADTLGRRLASELLLGLAAQRGSLRYLLEWIEMALGASAVVHTMEKGKLLSSQEGMISFDCFMTILMQMRRSLGSSADRSQWREPTRTSDGLCSLYEAALCLFEEVCRMASDYSRTCASPDSIQTGDAPIVSETCEVYVWGSNSSHQLVEGTQEKILQPKLAPSFSDAQTIEAGQYCTFVISTDGSVRACGKGSYGRLGLGDSNNQSTLKKLTFEPHRSIKKVSSSKGSDGHTLAFTTEGEVFSWGDGDYGKLGHGNSSTQKYPKLIQGPLQGKVVVCVSAGYRHSAAVTEDGELYTWGEGDFGRLGHGDSNSRNIPTLVKDISNVGEVSCGSSHTIALSKDGRTVWSFGGGDNGKLGHGDTNRVYKPKVIEALQGMFIRKVCAGSQSSLALTSTGQVYAWGCGACLGCGSSEATALRPKLIEELAATRIVDVSIGDSHCLALSHDNEVYAWGNNSMGQCGQGNSTGPITKPKKVSGLDGIAIQQISAGTSHSLAWTALPRDRQVVAWHRPYCVDLEESTFSHLRSFLERYCDKINSEIPPLPFPSSREHHSFLKLCLKLLSNHLALALAGGVATSILGRQAGPLRNLLFRLMDSTVPDEIQEVVIETLSVGATMLLPPLRERMELLHSLLPQGPDRWESLSKGQRMQLDIILTSLQDHTHVASLLGYSSPSDAADLSSVCTGYGNLSDQPYGTQSCHPDTHLAEILMKTLLRNLGFYTDQAFGELEKNSDKFLLGTSSSENSQPAHLHELLCSLQKQLLAFCHINNISENSSSVALLHKHLQLLLPHATDIYSRSANLLKESPWNGSVGEKLRDVIYVSAAGSMLCQIVNSLLLLPVSVARPLLSYLLDLLPPLDCLNRLLPAADLLEDQELQWPLHGGPELIDPAGLPLPQPAQSWVWLVDLERTIALLIGRCLGGMLQGSPVSPEEQDTAYWMKTPLFSDGVEMDTPQLDKCMSCLLEVALSGNEEQKPFDYKLRPEIAVYVDLALGCSKEPARSLWISMQDYAVSKDWDSATLSNESLLDTVSRFVLAALLKHTNLLSQACGESRYQPGKHLSEVYRCVYKVRSRLLACKNLELIQTRSSSRDRWISENQDSADVDPQEHSFTRTIDEEAEMEEQAERDREEGHPEPEDEEEEREHEVMTAGKIFQCFLSAREVARSRDRDRMNSGAGSGARADDPPPQSQQERRVSTDLPEGQDVYTAACNSVIHRCALLILGVSPVIDELQKRREEGQLQQPSTSASEGGGLMTRSESLTAESRLVHTSPNYRLIKSRSESDLSQPESDEEGYALSGRRNVDLDLAASHRKRGPMHSQLESLSDSWARLKHSRDWLCNSSYSFESDFDLTKSLGVHTLIENVVSFVSGDVGNAPGFKEPEESMSTSPQASIIAMEQQQLRAELRLEALHQILVLLSGMEEKGSISLAGSRLSSGFQSSTLLTSVRLQFLAGCFGLGTVGHTGAKGESGRLHHYQDGIRAAKRNIQIEIQVAVHKIYQQLSATLERALQANKHHIEAQQRLLLVTVFALSVHYQPVDVSLAISTGLLNVLSQLCGTDTMLGQPLQLLPKTGVSQLSTALKVASTRLLQILAITTGTYADKLSPKVVQSLLDLLCSQLKNLLSQTGVLHMASFGEGEQEDGEEEEKKVDSSGETEKKDFRAALRKQHAAELHLGDFLVFLRRVVSSKAIQSKMASPKWTEVLLNIASQKCSSGIPLVGNLRTRLLALHVLEAVLPACESGVEDDQMAQIVERLFSLLSDCMWETPIAQAKHAIQIKEKEQEIKLQKQGELEEEDENLPIQEVSFDPEKAQCCLVENGQILTHGSGGKGYGLASTGVTSGCYQWKFYIVKENRGNEGTCVGVSRWPVHDFNHRTTSDMWLYRAYSGNLYHNGEQTLTLSSFTQGDFITCVLDMEARTISFGKNGEEPKLAFEDVDAAELYPCVMFYSSNPGEKVKICDMQMRGTPRDLLPGDPICSPVAAVLAEATIQLIRILHRTDRWTYCINKKMMERLHKIKICIKESGQKLKKSRSVQSREENEMREEKESKEEEKGKHTRHGLADLSELQLRTLCIEVWPVLAVIGGVDAGLRVGGRCVHKQTGRHATLLGVVKEGSTSAKVQWDEAEITISFPTFWSPSDTPLYNLEPCEPLPFDVARFRGLTASVLLDLTYLTGVHEDMGKQSTKRHEKKHRHESEEKGDVEQKPESESALDMRTGLTSDDVKSQSTTSSKSENEIASFSLDPTLPSVESQHQITEGKRKNHEHMSKNHDVAQSEIRAVQLSYLYLGAMKSLSALLGCSKYAELLLIPKVLAENGHNSDCASSPVVHEDVEMRAALQFLMRHMVKRAVMRSPIKRALGLADLERAQAMIYKLVVHGLLEDQFGGKIKQEIDQQAEESDPAQQAQTPVTTSPSASSTTSFMSSSLEDTTTATTPVTDTETVPASESPGVMPLSLLRQMFSSYPTTTVLPTRRAQTPPISSLPTSPSDEVGRRQSLTSPDSQSARPANRTALSDPSSRLSTSPPPPAIAVPLLEMGFSLRQIAKAMEATGARGEADAQNITVLAMWMIEHPGHEDEEEPQSGSTADSRPGAAVLGSGGKSNDPCYLQSPGDIPSADAAEMEEGFSESPDNLDHTENAASGSGPSARGRSAVTRRHKFDLAARTLLARAAGLYRSVQAHRNQSRREGISLQQDPGALYDFNLDEELEIDLDDEAMEAMFGQDLTSDNDILGMWIPEVLDWPTWHVCESEDREEVVVCELCECSVVSFNQHMKRNHPGCGRSANRQGYRSNGSYVDGWFGGECGSGNPYYLLCGTCREKYLAMKTKSKSTSSERYKGQAPDLIGKQDSVYEEDWDMLDVDEDEKLTGEEEFELLAGPLGLNDRRIVPEPVQFPDSDPLGASVAMVTATNSMEETLMQIGCHGSVEKSSSGRITLGEQAAALANPHDRVVALRRVTAAAQVLLARTMVMRALSLLSVSGSSCSLAAGLESLGLTDIRTLVRLMCLAAAGRAGLSTSPSAMASTSERSRGGHSKANKPISCLAYLSTAVGCLASNAPSAAKLLVQLCTQNLISAATGVNLTTVDDSIQRKFLPSFLRGIAEENKLVTSPNFVVTQALVALLADKGAKLRPNYDKSEVEKKGPLELANALAACCLSSRLSSQHRQWAAQQLVRTLAAHDRDNQTTLQTLADMGGDLRKCSFIKLEAHQNRVMTCVWCNKKGLLATSGNDGTIRVWNVTKKQYSLQQTCVFNRLEGDAEESLGSPSDPSFSPVSWSISGKYLAGALEKMVNIWQVNGGKGLVDIQPHWVSALAWPEEGPATAWSGESPELLLVGRMDGSLGLIEVVDVSTMHRRELEHCYRKDVSVTCIAWFSEDRPFAVGYFDGKLLLGTKEPLEKGGIVLIDAHKDTLISMKWDPTGHILMTCAKEDSVKLWGSISGCWCCLHSLCHPSIVNGIAWCRLPGKGSKLQLLMATGCQSGLVCVWRIPQDTTQTNVTSAEGWWEQESNCQDGYRKSSGAKCVYQLRGHITPVRTVAFSSDGLALVSGGLGGLMNIWSLRDGSVLQTVVIGSGAIQTTVWIPEVGVAACSNRSKDVLVVNCTAEWAAANHVLATCRTALKQQGVLGLNMAPCMRAFLERLPMMLQEQYAYEKPHVVCGDQLVHSPYMQCLASLAVGLHLDQLLCNPPVPPHHQNCLPDPASWNPNEWAWLECFSTTIKAAEALTNGAQFPESFTVPDLEPVPEDELVFLMDNSKWINGMDEQIMSWATSRPEDWHLGGKCDVYLWGAGRHGQLAEAGRNVMVPAAAPSFSQAQQVICGQNCTFVIQANGTVLACGEGSYGRLGQGNSDDLHVLTVISALQGFVVTQLVTSCGSDGHSMALTESGEVFSWGDGDYGKLGHGNSDRQRRPRQIEALQGEEVVQMSCGFKHSAVVTSDGKLFTFGNGDYGRLGLGNTSNKKLPERVTALEGYQIGQVACGLNHTLAVSADGSMVWAFGDGDYGKLGLGNSTAKSSPQKIDVLCGIGIKKVACGTQFSVALTKDGHVYTFGQDRLIGLPEGRARNHNRPQQIPVLAGVIIEDVAVGAEHTLALASNGDVYAWGSNSEGQLGLGHTNHVREPTLVTGLQGKNVRQISAGRCHSAAWTAPPVPPRAPGVSVPLQLGLPDTVPPQYGALREVSIHTVRARLRLLYHFSDLMYSSWRLLNLSPNNQNSTSHYNAGTWGIVQGQLRPLLAPRVYTLPMVRSIGKTMVQGKNYGPQITVKRISTRGRKCKPIFVQIARQVVKLNASDLRLPSRAWKVKLVGEGADDAGGVFDDTITEMCQELETGIVDLLIPSPNATAEVGYNRDRFLFNPSACLDEHLMQFKFLGILMGVAIRTKKPLDLHLAPLVWKQLCCVPLTLEDLEEVDLLYVQTLNSILHIEDSGITEESFHEMIPLDSFVGQSADGKMVPIIPGGNSIPLTFSNRKEYVERAIEYRLHEMDRQVAAVREGMSWIVPVPLLSLLTAKQLEQMVCGMPEISVEVLKKVVRYREVDEQHQLVQWFWHTLEEFSNEERVLFMRFVSGRSRLPANTADISQRFQIMKVDRPYDSLPTSQTCFFQLRLPPYSSQLVMAERLRYAINNCRSIDMDNYMLSRNVDNAEGSDTDY

SEQ ID NO: 4186 - protein, 433 aa, Homo sapiens
MAEAQSGTGQLQEQKKGLLIAVSVSVDKIISHFGAARNLVQKAQLGDSRLSPDVGHLVLTTLCPALHALVADGLKPFRKDLITGQRRSSPWSVVEASVKPGSSTRSLGTLYSQVSRLAPLSSSRSRFHAFILGLLNTKQLELWFSSLQEDAGLLSLLYLPTGFFSLARGGCPSLSTELLLLLQPLSVLTFHLDLLFEHHHHLPLGPPQAPAPPGPPPALQQTMQAMLHFGGRLAQSLRGTSKEAASDPSDSPNLPTPGSWWEQLTQASRVYASGGTEGFPLSRWAPGRHGTAAEEGAQERPLPTDEMAPGRGLWLGRLFGVPGGPAENENGALKSRRPSSWLPPTVSVLALVKRGAPPEMPSPQELEASAPRMVQTHRAVRALCDHTAARPDQLSFRRGEVLRVITTVDEDWLRCGRDGMEGLVPVGYTSLVL

SEQ ID NO: 4187 - protein, 105 aa, Homo sapiens
MGDVEKGKKIFIMKCSQCHTVEKGGKHKTGPNLHGLFGRKTGQAPGYSYTAANKNKGIIWGEDTLMEYLENPKKYIPGTKMIFVGIKKKEERADLIAYLKKATNE

SEQ ID NO: 4188 - protein, 44 aa, Homo sapiens
MADKPDMGEIASFDKAKLKKTETQEKNTLPTKETIEQEKRSEIS

SEQ ID NO: 4189 - protein, 148 aa, Homo sapiens
MFRRPVLQVLRQFVRHESETTTSLVLERSLNRVHLLGRVGQDPVLRQVEGKNPVTIFSLATNEMWRSGDSEVYQLGDVSQKTTWHRISVFRPGLRDVAYQYVKKGSRIYLEGKIDYGEYMDKNNVRRQATTIIADNIIFLSDQTKEKE

SEQ ID NO: 4190 - protein, 467 aa, Homo sapiens
MSSILPFTPPVVKRLLGWKKSAGGSGGAGGGEQNGQEEKWCEKAVKSLVKKLKKTGRLDELEKAITTQNCNTKCVTIPSTCSEIWGLSTPNTIDQWDTTGLYSFSEQTRSLDGRLQVSHRKGLPHVIYCRLWRWPDLHSHHELKAIENCEYAFNLKKDEVCVNPYHYQRVETPVLPPVLVPRHTEILTELPPLDDYTHSIPENTNFPAGIEPQSNYIPETPPPGYISEDGETSDQQLNQSMDTGSPAELSPTTLSPVNHSLDLQPVTYSEPAFWCSIAYYELNQRVGETFHASQPSLTVDGFTDPSNSERFCLGLLSNVNRNATVEMTRRHIGRGVRLYYIGGEVFAECLSDSAIFVQSPNCNQRYGWHPATVCKIPPGCNLKIFNNQEFAALLAQSVNQGFEAVYQLTRMCTIRMSFVKGWGAEYRRQTVTSTPCWIELHLNGPLQWLDKVLTQMGSPSVRCSSMS

SEQ ID NO: 4191 - protein, 467 aa, Homo sapiens; identical to SEQ ID NO: 4190

SEQ ID NO: 4192 - protein, 1003 aa, Homo sapiens
MNGGNESSGADRAGGPVATSVPIGWQRCVREGAVLYISPSGTELSSLEQTRSYLLSDGTCKCGLECPLNVPKVFNFDPLAPVTPGGAGVGPASEEDMTKLCNHRRKAVAMATLYRSMETTCSHSSPGEGASPQMFHTVSPGPPSARPPCRVPPTTPLNGGPGSLPPEPPSVSQAFPTLAGPGGLFPPRLADPVPSGGSSSPRFLPRGNAPSPAPPPPPAISLNAPSYNWGAALRSSLVPSDLGSPPAPHASSSPPSDPPLFHCSDALTPPPLPPSNNLPAHPGPASQPPVSSATMHLPLVLGPLGGAPTVEGPGAPPFLASSLLSAAAKAQHPPLPPPSTLQGRRPRAQAPSASHSSSLRPSQRRPRRPPTVFRLLEGRGPQTPRRSRPRAPAPVPQPFSLPEPSQPILPSVLSLLGLPTPGPSHSDGSFNLLGSDAHLPPPPTLSSGSPPQPRHPIQPSLPGTTSGSLSSVPGAPAPPAASKAPVVPSPVLQSPSEGLGMGAGPACPLPPLAGGEAFPFPSPEQGLALSGAGFPGMLGALPLPLSLGQPPPSPLLNHSLFGVLTGGGGQPPPEPLLPPPGGPGPPLAPGEPEGPSLLVASLLPPPPSDLLPPPSAPPSNLLASFLPLLALGPTAGDGEGSAEGAGGPSGEPFSGLGDLSPLLFPPLSAPPTLIALNSALLAATLDPPSGTPPQPCVLSAPQPGPPTSSVTTATTDPGASSLGKAPSNSGRPPQLLSPLLGASLLGDLSSLTSSPGALPSLLQPPGPLLSGQLGLQLLPGGGAPPPLSEASSPLACLLQSLQIPPEQPEAPCLPPESPASALEPEPARPPLSALAPPHGSPDPPVPELLTGRGSGKRGRRGGGGLRGINGEARPARGRKPGSRREPGRLALKWGTRGGFNGQMERSPRRTHHWQHNGELAEGGAEPKDPPPPGPHSEDLKVPPGVVRKSRRGRRRKYNPTRNSNSSRQDITLEPSPTARAAVPLPPRARPGRPAKNKRRKLAP

SEQ ID NO: 4193 - protein, 911 aa, Homo sapiens
MKGSNRNKDHSAEGEGVGKRPKRKCLQWHPLLAKKLLDFSEEEEEEDEEEDIDKVQLLGADGLEQDVGETEDDESPEQRARRPMNAFLLFCKRHRSLVRQEHPRLDNRGATKILADWWAVLDPKEKQKYTDMAKEYKDAFMKANPGYKWCPTTNKPVKSPTPTVNPRKKLWAFPSDSSRDLPSPKKAKTEEMPQLNFGMADPTQMGGLSMLLLAGEHALGTPEVSSGTCRPDVSESPELRQKSPLFQFAEISSSTSHSDASTKQCQTSALFQFAEISSNTSQLGGAEPVKRCGKSALFQLAEMCLASEGMKMEESKLIKAKESDGGRIKELEKGKEEKEIKMEKTDETRLQKEAEFEKSAKENLRDSKELRNFEALQIDDIMAIKMEDPKEIRKEELEEDHKCSHFPDFSYSASSKIIISDVPSRKDHMCHPHGIMIIEDPAALNKPEKLKKKKKKSKMDRHGNDKSTPKKTCKKRQSSESDIESVIYTIEAVAKGDWGIEKLGDTPRKKVRTSSSGKGSILDAKPPKKKVKSREKKMSKEKSSDTTKESRPPDFISISASKNISGETPEGIKAEPLTPMEDALPPSLSGQAKPEDSDCHRKIETCGSRKSERSCKGALYKTLVSEGMLTSLRANVDRGKRSSGKGNSSDHEGCWNEESWTFSQSGTSGSKKFKKTKPKEDCLLGSAKLDEEFEKKFNSLPQYSPVTFDRKCVPVPRKKKKTGNVSSEPTKTSKGSGDKWSNKQLFLDAIHPTEAIFSEDRNTMEPVHKVKNIPSIFNTPEPTTTQEPLVGSQKRKARKTKITHLVRTADGRVSPAGGTLDDKPKEQLQRSLPKATETDCNDKCSHNTEVGETRSSTPEMPAVSAFFSLAALAEVAAMENVHRGQRSTPLTHDGQPKEMPQAPVLISCADQ

SEQ ID NO: 4194 - protein, 622 aa, Homo sapiens
MSRQTTSVGSSCLDLWREKNDRLVRQAKVAQNSGLTLRRQQLAQDALEGLRGLLHSLQGLPAAVPVLPLELTVTCNFIILRASLAQGFTEDQAQDIQRSLERVLETQEQQGPRLEQGLRELWDSVLRASCLLPELLSALHRLVGLQAALWLSADRLGDLALLLETLNGSQSGASKDLLLLLKTWSPPAEELDAPLTLQDAQGLKDVLLTAFAYRQGLQELITGNPDKALSSLHEAASGLCPRPVLVQVYTALGSCHRKMGNPQRALLYLVAALKEGSAWGPPLLEASRLYQQLGDTTAELESLELLVEALNVPCSSKAPQFLIEVELLLPPPDLASPLHCGTQSQTKHILASRCLQTGRAGDAAEHYLDLLALLLDSSEPRFSPPPSPPGPCMPEVFLEAAVALIQAGRAQDALTLCEELLSRTSSLLPKMSRLWEDARKGTKELPYCPLWVSATHLLQGQAWVQLGAQKVAISEFSRCLELLFRATPEEKEQGAAFNCEQGCKSDAALQQLRAAALISRGLEWVASGQDTKALQDFLLSVQMCPGNRDTYFHLLQTLKRLDRRDEATALWWRLEAQTKGSHEDALWSLPLYLESYLSWIRPSDRDAFLEEFRTSLPKSCDL

SEQ ID NO: 4195 - protein, 457 aa, Homo sapiens
MLLRAAWRRAAVAVTAAPGPKPAAPTRGLRLRVGDRAPQSAVPADTAAAPEVGPVLRPLYMDVQATTPLDPRVLDAMLPYLINYYGNPHSRTHAYGWESEAAMERARQQVASLIGADPREIIFTSGATESNNIAIKGVARFYRSRKKHLITTQTEHKCVLDSCRSLEAEGFQVTYLPVQKSGIIDLKELEAAIQPDTSLVSVMTVNNEIGVKQPIAEIGRICSSRKVYFHTDAAQAVGKIPLDVNDMKIDLMSISGHKIYGPKGVGAIYIRRRPRVRVEALQSGGGQERGMRSGTVPTPLVVGLGAACEVAQQEMEYDHKRISKLSERLIQNIMKSLPDVVMNGDPKHHYPGCINLSFAYVEGESLLMALKDVALSSGSACTSASLEPSYVLRAIGTDEDLAHSSIRFGIGRFTTEEEVDYTVEKCIQHVKRLREMSPLWEMVQDGIDLKSIKWTQH

SEQ ID NO: 4196 - protein, 189 aa, Homo sapiens
MLLRAAWRRAAVAVTAAPGPKPAAPTRGLRLRVGDRAPQSAVPADTAAAPEVGPVLRPLYMDVQATTPLDPRVLDAMLPYLINYYGNPHSRTHAYGWESEAAMERARQQVASLIGADPREIIFTSGATESNNIAIKTESHSVIQAGVQWHDLDSLQAPPPGFTPFSCLSLLSSWDYRRPPPHPANFLYF

SEQ ID NO: 4197 - protein, 360 aa, Homo sapiens
MSQGRGKYDFYIGLGLAMSSSIFIGGSFILKKKGLLRLARKGSMRAGQGGHAYLKEWLWWAGLLSMGAGEVANFAAYAFAPATLVTPLGALSVLVSAILSSYFLNERLNLHGKIGCLLSILGSTVMVIHAPKEEEIETLNEMSHKLGDPGFVVFATLVVIVALILIFVVGPRHGQTNILVYITICSVIGAFSVSCVKGLGIAIKELFAGKPVLRHPLAWILLLSLIVCVSTQINYLNRALDIFNTSIVTPIYYVFFTTSVLTCSAILFKEWQDMPVDDVIGTLSGFFTIIVGIFLLHAFKDVSFSLASLPVSFRKDEKAMNGNLSNMYEVLNNNEESLTCGIEQHTGENVSRRNGNLTAF

SEQ ID NO: 4198 - protein, 360 aa, Homo sapiens; identical to SEQ ID NO: 4197

SEQ ID NO: 4199 - protein, 341 aa, Homo sapiens
MSQGRGKYDFYIGLGLAMSSSIFIGGSFILKKKGLLRLARKGSMRAVGAGEVANFAAYAFAPATLVTPLGALSVLVSAILSSYFLNERLNLHGKIGCLLSILGSTVMVIHAPKEEEIETLNEMSHKLGDPGFVVFATLVVIVALILIFVVGPRHGQTNILVYITICSVIGAFSVSCVKGLGIAIKELFAGKPVLRHPLAWILLLSLIVCVSTQINYLNRALDIFNTSIVTPIYYVFFTTSVLTCSAILFKEWQDMPVDDVIGTLSGFFTIIVGIFLLHAFKDVSFSLASLPVSFRKDEKAMNGNLSNMYEVLNNNEESLTCGIEQHTGENVSRRNGNLTAF

SEQ ID NO: 4200 - protein, 360 aa, Homo sapiens; identical to SEQ ID NO: 4197

SEQ ID NO: 4201 - protein, 416 aa, Homo sapiens
MNESHKSEFIELRKWLKARKFQDSNLAPACFPGTGRGLMSQTSLQEGQMIISLPESCLLTTDTVIRSYLGAYITKWKPPPSPLLALCTFLVSEKHAGHRSLWKPYLEILPKAYTCPVCLEPEVVNLLPKSLKAKAEEQRAHVQEFFASSRDFFSSLQPLFAEAVDSIFSYSALLWAWCTVNTRAVYLRPRQRECLSAEPDTCALAPYLDLLNHSPHVQVKAAFNEETHSYEIRTTSRWRKHEEVFICYGPHDNQRLFLEYGFVSVHNPHACVYVSREILVKYLPSTDKQMDKKISILKDHGYIENLTFGWDGPSWRLLTALKLLCLEAEKFTCWKKVLLGEVISDTNEKTSLDIAQKICYYFIEETNAVLQKVSHMKDEKEALINQLTLVESLWTEELKILRASAETLHSLQTAFT

SEQ ID NO: 4202 - protein, 307 aa, Homo sapiens
MQKGKGRTSRIRRRKLCGSSESRGVNESHKSEFIELRKWLKARKFQDSNLAPACFPGTGRGLMSQTSLQEGQMIISLPESCLLTTDTVIRSYLGAYITKWKPPPSPLLALCTFLVSEKHAGHRSLWKPYLEILPKAYTCPVCLEPEVVNLLPKSLKAKAEEQRAHVQEFFASSRDFFSSLQPLFAEAVDSIFSYSALLWAWCTVNTRAVYLRPRQRECLSAEPDTCALAPYLDLLNHSPHVQVKAAFNEETHSYEIRTTSRWRKHEEVFICYGPHDNQRLFLEYGFVSVHNPHACVYVSRGWNQLCS

SEQ ID NO: 4203 - protein, 283 aa, Homo sapiens
MNESHKSEFIELRKWLKARKFQDSNLAPACFPGTGRGLMSQTSLQEGQMIISLPESCLLTTDTVIRSYLGAYITKWKPPPSPLLALCTFLVSEKHAGHRSLWKPYLEILPKAYTCPVCLEPEVVNLLPKSLKAKAEEQRAHVQEFFASSRDFFSSLQPLFAEAVDSIFSYSALLWAWCTVNTRAVYLRPRQRECLSAEPDTCALAPYLDLLNHSPHVQVKAAFNEETHSYEIRTTSRWRKHEEVFICYGPHDNQRLFLEYGFVSVHNPHACVYVSRGWNQLCS

SEQ ID NO: 4204 - protein, 283 aa, Homo sapiens; identical to SEQ ID NO: 4203

SEQ ID NO: 4205 - protein, 129 aa, Homo sapiens
MQKGKGRTSRIRRRKLCGSSESRGVNESHKSEFIELRKWLKARKFQDSNLAPACFPGTGRGLMSQTSLQVEASSISSAGAVHLFSFRKACWAPISLEALPGDFTQGVYLPCLFGAGSGEPSSQIFKSKG

SEQ ID NO: 4206 - protein, 440 aa, Homo sapiens
MQKGKGRTSRIRRRKLCGSSESRGVNESHKSEFIELRKWLKARKFQDSNLAPACFPGTGRGLMSQTSLQEGQMIISLPESCLLTTDTVIRSYLGAYITKWKPPPSPLLALCTFLVSEKHAGHRSLWKPYLEILPKAYTCPVCLEPEVVNLLPKSLKAKAEEQRAHVQEFFASSRDFFSSLQPLFAEAVDSIFSYSALLWAWCTVNTRAVYLRPRQRECLSAEPDTCALAPYLDLLNHSPHVQVKAAFNEETHSYEIRTTSRWRKHEEVFICYGPHDNQRLFLEYGFVSVHNPHACVYVSREILVKYLPSTDKQMDKKISILKDHGYIENLTFGWDGPSWRLLTALKLLCLEAEKFTCWKKVLLGEVISDTNEKTSLDIAQKICYYFIEETNAVLQKVSHMKDEKEALINQLTLVESLWTEELKILRASAETLHSLQTAFT

SEQ ID NO: 4207 - protein, 140 aa, Homo sapiens
MAQQRALPQSKETLLQSYNKRLKDDIKSIMDNFTEIIKTAKIEDETQVSRATQGEQDNYEMHVRAANIVRAGESLMKLVSDLKQFLILNDFPSVNEAIDQRNQQLRTLQEECDRKLITLRDEISIDLYELEEEYYSSRYK

SEQ ID NO: 4208 - protein, 200 aa, Homo sapiens
MAQQRALPQSKETLLQSYNKRLKDDIKSIMDNFTEIIKTAKIEDETQVSRATQGEQDNYEMHVRAANIVRAGESLMKLVSDLKQFLILNDFPSVNEAIDQRNQQLRTLQEECDRKLITLRDEISIDLYELEEEYYSSSSSLCEANDLPLCEAYGRLDLDTDSADGLSAPLLASPEPSAGPLQVAAPAHSHAGGPGPTEHA

SEQ ID NO: 4209 - protein, 140 aa, Homo sapiens; identical to SEQ ID NO: 4207

SEQ ID NO: 4210 - protein, 548 aa, Homo sapiens
MVLAELYVSDREGSDATGDGTKEKPFKTGLKALMTVGKEPFPTIYVDSQKENERWNVISKSQLKNIKKMWHREQMKSESREKKEAEDSLRREKNLEEAKKITIKNDPSLPEPKCVKIGALEGYRGQRVKVFGWVHRLRRQGKNLMFLVLRDGTGYLQCVLADELCQCYNGVLLSTESSVAVYGMLNLTPKGKQAPGGHELSCDFWELIGLAPAGGADNLINEESDVDVQLNNRHMMIRGENMSKILKARSMVTRCFRDHFFDRGYYEVTPPTLVQTQVEGGATLFKLDYFGEEAFLTQSSQLYLETCLPALGDVFCIAQSYRAEQSRTRRHLAEYTHVEAECPFLTFDDLLNRLEDLVCDVVDRILKSPAGSIVHELNPNFQPPKRPFKRMNYSDAIVWLKEHDVKKEDGTFYEFGEDIPEAPERLMTDTINEPILLCRFPVEIKSFYMQRCPEDSRLTESVDVLMPNVGEIVGGSMRIFDSEEILAGYKREGIDPTPYYWYTDQRKYGTCPHGGYGLGLERFLTWILNRYHIRDVCLYPRFVQRCTP

SEQ ID NO: 4211 - protein, 240 aa, Homo sapiens
MLRSCAARLRTLGALCLPPVGRRLPGSEPRPELRSFSSEEVILKDCSVPNPSWNKDLRLLFDQFMKKCEDGSWKRLPSYKRTPTEWIQDFKTHFLDPKLMKEEQMSQAQLFTRSFDDGLGFEYVMFYNDIEKRMVCLFQGGPYLEGPPGFIHGGAIATMIDATVGMCAMMAGGIVMTANLNINYKRPIPLCSVVMINSQLDKVEGRKFFVSCNVQSVDEKTLYSEATSLFIKLNPAKSLT

SEQ ID NO: 4212 - protein, 107 aa, Homo sapiens
MLRSCAARLRTLGALCLPPVGRRLPGSEPRPELRSFSSEEVILKDCSVPNPSWNKDLRLLFDQFMKKCEDGSWKRLPSYKRTPTEWIQDFKTHFLAWLMAGRCGSRL

SEQ ID NO: 4213 - protein, 121 aa, Homo sapiens
MVDMMDLPRSRINAGMLAQFIDKPVCFVGRLEKIHPTGKMFILSDGEGKNGTIELMEPLDEEISGIVEVVGRVTAKATILCTSYVQFKEDSHPFDLGLYNEAVKIIHDFPQFYPLGIVQHD

SEQ ID NO: 4214 - protein, 282 aa, Homo sapiens
MRPVSWGAQISWKQADPFASLKKVGKDSTVLLICITVFLSYLPEAGQYSSFFLYLRQVIGFGSVKIAAFIAMVGILSIVAQTAFLSILMRSLGNKNTVLLGLGFQMLQLAWYGFGSQAWMMWAAGTVAAMSSITFPAISALVTRNAESDQQGVAQGIITGIRGLCNGLGPALYGFIFYMFHVELTELGPKLNSNNVPLQGAVIPGPPFLFGACIVLMSFLVALFIPEYSKASGVQKHSNSSSGSLTNTPERGSDEDIEPLLQDSSIWELSSFEEPGNQCTEL

SEQ ID NO: 4215 - protein, 309 aa, Homo sapiens
MEELLRRELGCSSVRATGHSGGGCISQGRSYDTDQGRVFVKVNPKAEARRMFEGEMASLTAILKTNTVKVPKPIKVLDAPGGGSVLVMEHMDMRHLSSHAAKLGAQLADLHLDNKKLGEMRLKEAGTVGRGGGQEERPFVARFGFDVVTCCGYLPQVNDWQEDWVVFYARQRIQPQMDMVEKESGDREALQLWSALQLKIPDLFRDLEIIPALLHGDLWGGNVAEDSSGPVIFDPASFYGHSEYELAIAGMFGGFSSSFYSAYHGKIPKAPGFEKRLQLYQLFHYLNHWNHFGSGYRGSSLNIMRNLVK

SEQ ID NO: 4216 - protein, 442 aa, Homo sapiens
MRRTRRPRFVLMNKMDDLNLHYRFLNWRRRIREIREVRAFRYQERFKHILVDGDTLSYHGNSGEVGCYVASRPLTKDSNYFEVSIVDSGVRGTIAVGLVPQYYSLDHQPGWLPDSVAYHADDGKLYNGRAKGRQFGSKCNSGDRIGCGIEPVSFDVQTAQIFFTKNGKRVGSTIMPMSPDGLFPAVGMHSLGEEVRLHLNAELGREDDSVMMVDSYEDEWGRLHDVRVCGTLLEYLGKGKSIVDVGLAQARHPLSTRSHYFEVEIVDPGEKCYIALGLARKDYPKNRHPGWSRGSVAYHADDGKIFHGSGVGDPFGPRCYKGDIMGCGIMFPRDYILDSEGDSDDSCDTVILSPTARAVRNVRNVMYLHQEGEEEEEEEEEEEDGEEIEPEHEGRKVVVFFTRNGKIIGKKDAVVPSGGFFPTIGMLSCGEKVKVDLHPLSG

SEQ ID NO: 4217 - protein, 508 aa, Homo sapiens
MPPKRNEKYKLPIPFPEGKVLDDMEGNQWVLGKKIGSGGFGLIYLAFPTNKPEKDARHVVKVEYQENGPLFSELKFYQRVAKKDCIKKWIERKQLDYLGIPLFYGSGLTEFKGRSYRFMVMERLGIDLQKISGQNGTFKKSTVLQLGIRMLDVLEYIHENEYVHGDIKAANLLLGYKNPDQVYLADYGLSYRYCPNGNHKQYQENPRKGHNGTIEFTSLDAHKGVALSRRSDVEILGYCMLRWLCGKLPWEQNLKDPVAVQTAKTNLLDELPQSVLKWAPSGSSCCEIAQFLVCAHSLAYDEKPNYQALKKILNPHGIPLGPLDFSTKGQSINVHTPNSQKVDSQKAATKQVNKAHNRLIEKKVHSERSAESCATWKVQKEEKLIGLMNNEAAQESTRRRQKYQESQEPLNEVNSFPQKISYTQFPNSFYEPHQDFTSPDIFKKSRSPSWYKYTSTVSTGITDLESSTGLWPTISQFTLSEETNADVYYYRIIIPVLLMLVFLALFFL

SEQ ID NO: 4218 - protein, 426 aa, Homo sapiens
MSPAFRAMDVEPRAKGVLLEPFVHQVGGHSCVLRFNETTLCKPLVPREHQFYETLPAEMRKFTPQYKGVVSVRFEEDEDRNLCLIAYPLKGDHGIVDIVDNSDCEPKSKLLRWTTNKKHHVLETEKTPKDWVRQHRKEEKMKSHKLEEEFEWLKKSEVLYYTVEKKGNISSQLKHYNPWSMKCHQQQLQRMKENAKHRNQYKFILLENLTSRYEVPCVLDLKMGTRQHGDDASEEKAANQIRKCQQSTSAVIGVRVCGMQVYQAGSGQLMFMNKYHGRKLSVQGFKEALFQFFHNGRYLRRELLGPVLKKLTELKAVLERQESYRFYSSSLLVIYDGKERPEVVLDSDAEDLEDLSEESADESAGAYAYKPIGASSVDVRMIDFAHTTCRLYGEDTVVHEGQDAGYIFGLQSLIDIVTEISEESGE

SEQ ID NO: 4219 - protein, 97 aa, Homo sapiens
MSPAFRAMDVEPRAKGVLLEPFVHQVGGHSCVLRFNETTLCKPLVPREHQFYETLPAEMRKFTPQYKGQSQRPLVSWPSLPHFFPWSFPLWPQGSVA

SEQ ID NO: 4220 - protein, 97 aa, Homo sapiens; identical to SEQ ID NO: 4219

SEQ ID NO: 4221 - protein, 70 aa, Homo sapiens
MSPAFRAMDVEPRAKGVLLEPFVHQVGGHSCVLRFNETTLCKPLVPREHQFYETLPAEMRKFTPQYKGVS

SEQ ID NO: 4222 - protein, 70 aa, Homo sapiens; identical to SEQ ID NO: 4221

SEQ ID NO: 4223 - protein, 426 aa, Homo sapiens; identical to SEQ ID NO: 4218

SEQ ID NO: 4224 - protein, 508 aa, Homo sapiens
MAKSNGENGPRAPAAGESLSGTRESLAQGPDAATTDELSSLGSDSEANGFAERRIDKFGFIVGSQGAEGALEEVPLEVLRQRESKWLDMLNNWDKWMAKKHKKIRLRCQKGIPPSLRGRAWQYLSGGKVKLQQNPGKFDELDMSPGDPKWLDVIERDLHRQFPFHEMFVSRGGHGQQDLFRVLKAYTLYRPEEGYCQAQAPIAAVLLMHMPAEQAFWCLVQICEKYLPGYYSEKLEAIQLDGEILFSLLQKVSPVAHKHLSRQKIDPLLYMTEWFMCAFSRTLPWSSVLRVWDMFFCEGVKIIFRVGLVLLKHALGSPEKVKACQGQYETIERLRSLSPKIMQEAFLVQEVVELPVTERQIEREHLIQLRRWQETRGELQCRSPPRLHGAKAILDAEPGPRPALQPSPSIRLPLDAPLPGSKAKPKPPKQAQKEQRKQMKGRGQLEKPPAPNQAMVVAAAGDACPPQHVPPKDSAPKDSAPQDLAPQVSAHHRSQESLTSQESEDTYL

SEQ ID NO: 4225 - protein, 232 aa, Homo sapiens
MGPLALPAWLQPRYRKNAYLFIYYLIQFCGHSWIFTNMTVRFFSFGNDSMVDTFYAIGLVMRLCQSVSLLELLHIYVGIESNHLLPRFLQLTERIIILFVVITSQEEVQEKYVVCVLFVFWNLLDMVRYTYSMLSVIGISYAVLTWLSQTLWMPIYPLCVLAEAFAIYQSLPYFESFGTYSTKLPFDLSIYFPYVLKIYLMMLFIGMYFTYSHLYSERRDILGIFPIKKKKM

SEQ ID NO: 4226 - protein, 229 aa, Homo sapiens
MTCCSQVPPRRRPSLALSPRLDCNGLNGVPGSIWDFVSGSFSPSPSPILSAGPPSSSSASPNGAELARVRRQLDEAKRKIRQWEESWQQVKQVCDAWQREAQEAKERARVADSDRQLALQKKEEVEAQVKQLQEELEGLGVASTLPGLRGCGDIGTIPLPKLHSLQSQLRLDLEAVDGVIFQLRAKQCVACRERAHGAVLRPCQHHILCEPCAATAPECPYCKGQPLQW

SEQ ID NO: 4227 - protein, 523 aa, Homo sapiens
MANVGLQFQASAGDSDPQSRPLLLLGQLHHLHRVPWSHVRGKLQPRVTEELWQAALSTLNPNPTDSCPLYLNYATVAALPCRVSRHNSPSAAHFITRLVRTCLPPGAHRCIVMVCEQPEVFASACALARAFPLFTHRSGASRRLEKKTVTVEFFLVGQDNGPVEVSTLQCLANATDGVRLAARIVDTPCNEMNTDTFLEEINKVGKELGIIPTIIRDEELKTRGFGGIYGVGKAALHPPALAVLSHTPDGATQTIAWVGKGIVYDTGGLSIKGKTTMPGMKRDCGGAAAVLGAFRAAIKQGFKDNLHAVFCLAENSVGPNATRPDDIHLLYSGKTVEINNTDAEGRLVLADGVSYACKDLGADIILDMATLTGAQGIATGKYHAAVLTNSAEWEAACVKAGRKCGDLVHPLVYCPELHFSEFTSAVADMKNSVADRDNSPSSCAGLFIASHIGFDWPGVWVHLDIAAPVHAGERATGFGVALLLALFGRASEDPLLNLVSPLGCEVDVEEGDLGRDSKRRRLV

SEQ ID NO: 4228 - protein, 1402 aa, Homo sapiens
MHQTLCLNPESLKMSACSDFVEHIWKPGSCKNCFCLRSDHQLVAGPPQPRAGSLPPPPRLPPRPENCRLEDEGVNSSPYSKPTIAVKPTMMSSEASDVWTEANLSAEVSQVIWRRAPGKLPLPKQEDAPVVYLGSFRGVQKPAGPSTSPDGNSRCPPAYTMVGLHNLEPRGERNIAFHPVSFPEEKAVHKEKPSFPYQDRPSTQESFRQKLAAFAGTTSGCHQGPGPLRESLPSEDDSDQRCSPSGDSEGGEYCSILDCCPGSPVAKAASQTAGSRGRHGGRDCSPTCWEQGKCSGPAEQEKRGPSFPKECCSQGPTAHPSCLGPKKLSLTSEAAISSDGLSCGSGSGSGASSPFVPHLESDYCSLMKEPAPEKQQDPGCPGVTPSRCLGLTGEPQPPAHPREATQPEPIYAESTKRKKAAPVPSKSQAKIEHAAAAQGQGQVCTGNAWAQKAASGWGRDSPDPTPQVSATITVMAAHPEEDHRTIYLSSPDSAVGVQWPRGPVSQNSEVGEEETSAGQGLSSRESHAHSASESKPKERPAIPPKLSKSSPVGSPVSPSAGGPPVSPLADLSDGSSGGSSIGPQPPSQGPADPAPSCRTNGVAISDPSRCPQPAASSASEQRRPRFQAGTWSRQCRIEEEEEVEQELLSHSWGRETKNGPTDHSNSTTWHRLHPTDGSSGQNSKVGTGMSKSASFAFEFPKDRSGIETFSPPPPPPKSRHLLKMNKSSSDLEKVSQGSAESLSPSFRGVHVSFTTGSTDSLASDSRTCSDGGPSSELAHSPTNSGKKLFAPVPFPSGSTEDVSPSGPQQPPPLPQKKIVSRAASSPDGFFWTQGSPKPGTASPKLNLSHSETNVHDESHFSYSLSPGNRHHPVFSSSDPLEKAFKGSGHWLPAAGLAGNRGGCGSPGLQCKGAPSASSSQLSVSSQASTGSTQLQLHGLLSNISSKEGTYAKLGGLYTQSLARLVAKCEDLFMGGQKKELHFNENNWSLFKLTCNKPCCDSGDAIYYCATCSEDPGSTYAVKICKAPEPKTVSYCSPSVPVHFNIQQDCGHFVASVPSSMLSSPDAPKDPVPALPTHPPAQEQDCVVVITREVPHQTASDFVRDSAASHQAEPEAYERRVCFLLLQLCNGLEHLKEHGIIHRDLCLENLLLVHCTLQAGPGPAPAPAPAPAAAAPPCSSAAPPAGGTLSPAAGPASPEGPREKQLPRLIISNFLKAKQKPGGTPNLQQKKSQARLAPEIVSASQYRKFDEFQTGILIYELLHQPNPFEVRAQLRERDYRQEDLPPLPALSLYSPGLQQLAHLLLEADPIKRIRIGEAKRVLQCLLWGPRRELVQQPGTSEEALCGTLHNWIDMKRALMMMKFAEKAVDRRRGVELEDWLCCQYLASAEPGALLQSLKLLQLL

SEQ ID NO: 4229 - protein, 1404 aa, Homo sapiens
MHQTLCLNPESLKMSACSDFVEHIWKPGSCKNCFCLRSDHQLVAGPPQPRAGSLPPPPRLPPRPENCRLEDEGVNSSPYSKPTIAVKPTMMSSEASDVWTEANLSAEVSQVIWRRAPGKLPLPKQEDAPVVYLGSFRGVQKPAGPSTSPDGNSRCPPAYTMVGLHNLEPRGERNIAFHPVSFPEEKAVHKEKPSFPYQDRPSTQESFRQKLAAFAGTTSGCHQGPGPLRESLPSEDDSDQRCSPSGDSEGGEYCSILDCCPGSPVAKAASQTAGSRGRHGGRDCSPTCWEQGKCSGPAEQEKRGPSFPKECCSQGPTAHPSCLGPKKLSLTSEAAISSDGLSCGSGSGSGSGASSPFVPHLESDYCSLMKEPAPEKQQDPGCPGVTPSRCLGLTGEPQPPAHPREATQPEPIYAESTKRKKAAPVPSKSQAKIEHAAAAQGQGQVCTGNAWAQKAASGWGRDSPDPTPQVSATITVMAAHPEEDHRTIYLSSPDSAVGVQWPRGPVSQNSEVGEEETSAGQGLSSRESHAHSASESKPKERPAIPPKLSKSSPVGSPVSPSAGGPPVSPLADLSDGSSGGSSIGPQPPSQGPADPAPSCRTNGVAISDPSRCPQPAASSASEQRRPRFQAGTWSRQCRIEEEEEVEQELLSHSWGRETKNGPTDHSNSTTWHRLHPTDGSSGQNSKVGTGMSKSASFAFEFPKDRSGIETFSPPPPPPKSRHLLKMNKSSSDLEKVSQGSAESLSPSFRGVHVSFTTGSTDSLASDSRTCSDGGPSSELAHSPTNSGKKLFAPVPFPSGSTEDVSPSGPQQPPPLPQKKIVSRAASSPDGFFWTQGSPKPGTASPKLNLSHSETNVHDESHFSYSLSPGNRHHPVFSSSDPLEKAFKGSGHWLPAAGLAGNRGGCGSPGLQCKGAPSASSSQLSVSSQASTGSTQLQLHGLLSNISSKEGTYAKLGGLYTQSLARLVAKCEDLFMGGQKKELHFNENNWSLFKLTCNKPCCDSGDAIYYCATCSEDPGSTYAVKICKAPEPKTVSYCSPSVPVHFNIQQDCGHFVASVPSSMLSSPDAPKDPVPALPTHPPAQEQDCVVVITREVPHQTASDFVRDSAASHQAEPEAYERRVCFLLLQLCNGLEHLKEHGIIHRDLCLENLLLVHCTLQAGPGPAPAPAPAPAAAAPPCSSAAPPAGGTLSPAAGPASPEGPREKQLPRLIISNFLKAKQKPGGTPNLQQKKSQARLAPEIVSASQYRKFDEFQTGILIYELLHQPNPFEVRAQLRERDYRQEDLPPLPALSLYSPGLQQLAHLLLEADPIKRIRIGEAKRVLQCLLWGPRRELVQQPGTSEEALCGTLHNWIDMKRALMMMKFAEKAVDRRRGVELEDWLCCQYLASAEPGALLQSLKLLQLL

SEQ ID NO: 4230 - protein, 283 aa, Homo sapiens
MTSGPGGPAAAAGGRKENHQWYVCNREKLCESLQAVFVQSYLDQGTQIFLNNSIEKSGWLFIQLYHSFVSSVFSLFMSRTSINGLLGRGSMFVFSPDQFQRLLKINPDWKTHRLLDLGAGDGEVTKIMSPHFEEIYATELSETMIWQLQKKKYRVLGINEWQNTGFQYDVISCLNLLDRCDQPLTLLKDIRSVLEPTRGRVILALVLPFHPYVENVGGKWEKPSEILEIKGQNWEEQVNSLPEVFRKAGFVIEAFTRLPYLCEGDMYNDYYVLDDAVFVLKPV

SEQ ID NO: 4231 - protein, 670 aa, Homo sapiens
MAEVVAEVAEMPTQMSPGAVEMSTPMSAEMMEMSTEVTEMTPGEALASSLFFQHHQFMCSECGSLYNTLEEVLSHQEQHMLAVSEEEALTTQNVGLEPELVPGAEGPFQCGECSQLILSPGELLAHQDAHLRESANQIQYQCWDCQELFPSPELWVAHRKAQHLSATVAEPPVPPPLPPPTPLPPPSPPSEVKMEPYECPECSTLCATPEEFLEHQGTHFDSLEKEERNGLEEEEEDDEEDEEDDEEMEDEEAMAEVGDDAVGGDESTAGWAQGCGDCPQHQPSAGARRQHRRTAHSPASATHPFHCSQCQRSFSSANRLQAHGRAHVGGTHECTTCSKVFKKAASLEQHLRLHRGEARYLCVDCGRGFGTELTLVAHRRAHTANPLHRCRCGKTFSNMTKFLYHRRTHAGKSGAPPTGATAPPAPAEPTPPPPPPAPPAQLPCPQCSKSFASASRLSRHRRAVHGPPERRHRCGVCGKGFKKLIHVRNHLRTHTGERPFQCHSCGKTFASLANLSRHQLTHTGARPYQCLDCGKRFTQSSNLQQHRRLHLRPVAFARAPRLPITGLYNKSPYYCGTCGRWFRAMAGLRLHQRVHARARTLTLQPPRSPSPAPPPPPEPQQTIMCTELGETIAIIETSQPLALEDTLQLCQAALGASEAGGLLQLDTAFV

SEQ ID NO: 4232 - protein, 224 aa, Homo sapiens
MSVFGKLFGAGGGKAGKGGPTPQEAIQRLRDTEEMLSKKQEFLEKKIEQELTAAKKHGTKNKRAALQALKRKKRYEKQLAQIDGTLSTIEFQREALENANTNTEVLKNMGYAAKAMKAAHDNMDIDKVDELMQDIADQQELAEEISTAISKPVGFGEEFDEDELMAELEELEQEELDKNLLEISGPETVPLPNVPSIALPSKPAKKKEEEDDDMKELENWAGSM

SEQ ID NO: 4233 - protein, 724 aa, Homo sapiens
MKSAKGIENLAFVPSSPDILRRLSASPSQIEVSALSSDPQRENSQPQELQKPQEPQKSPEPSLPSAPPNVSEEKLRSLSLSEFEEGSYGWRNFHPQCLQRCNTPGGFLLHYCLLAVTQGIVVNGLVNISISTVEKRYEMKSSLTGLISSSYDISFCLLSLFVSFFGERGHKPRWLAFAAFMIGLGALVFSLPQFFSGEYKLGSLFEDTCVTTRNSTSCTSSTSSLSNYLYVFILGQLLLGAGGTPLYTLGTAFLDDSVPTHKSSLYIGTGYAMSILGPAIGYVLGGQLLTIYIDVAMGESTDVTEDDPRWLGAWWIGFLLSWIFAWSLIIPFSCFPKHLPGTAEIQAGKTSQAHQSNSNADVKFGKSIKDFPAALKNLMKNAVFMCLVLSTSSEALITTGFATFLPKFIENQFGLTSSFAATLGGAVLIPGAALGQILGGFLVSKFRMTCKNTMKFALFTSGVALTLSFVFMYAKCENEPFAGVSESYNGTGELGNLIAPCNANCNCSRSYYYPVCGDGVQYFSPCFAGCSNPVAHRKPKVYYNCSCIERKTEITSTAETFGFEAKAGKCETHCAKLPIFLCIFFIVIIFTFMAGTPITVSILRCVNHRQRSLALGIQFMVLRLLGTIPGPIIFGFTIDSTCILWDINDCGIKGACWIYDNIKMAHMLVAISVTCKVITMFFNGFAIFLYKPPPSATDVSFHKENAVVTNVLAEQDLNKIVKEG

SEQ ID NO: 4234 - protein, 686 aa, Homo sapiens
MMIQWNGPKTSISEKARGLALTYSLRDRERGGGRAQIGVVDDEAKAPDLMQIMEAVLGRRVGSLRAATPSKDINQLQKANVRLYHVYEKGKDLVVLELATPPLTQDLLQEEDFYILDQGGFKIYVWQGRMSSLQERKAAFSRAVGFIQAKGYPTYTNVEVVNDGAESAAFKQLFRTWSEKRRRNQKLGGRDKSIHVKLDVGKLHTQPKLAAQLRMVDDGSGKVEVWCIQDLHRQPVDPKRHGQLCAGNCYLVLYTYQRLGRVQYILYLWQGHQATADEIEALNSNAEELDVMYGGVLVQEHVTMGSEPPHFLAIFQGQLVIFQERAGHHGKGQSASTTRLFQVQGTDSHNTRTMEVPARASSLNSSDIFLLVTASVCYLWFGKGCNGDQREMARVVVTVISRKNEETVLEGQEPPHFWEALGGRAPYPSNKRLPEEVPSFQPRLFECSSHMGCLVLAEVGFFSQEDLDKYDIMLLDTWQEIFLWLGEAASEWKEAVAWGQEYLKTHPAGRSPATPIVLVKQGHEPPTFIGWFFTWDPYKWTSHPSHKEVVDGSPAAASTISEITAEVNNLRLSRWPGNGRAGAVALQALKGSQDSSENDLVRSPKSAGSRTSSSVSSTSATINGGLRREQLMHQAVEDLPEGVDPARREFYLSDSDFQDIFGKSKEEFYSMATWRQRQEKKQLGFF

SEQ ID NO: 4235 - protein, 248 aa, Homo sapiens
MALCEAAGCGSALLWPRLLLFGDSITQFSFQQGGWGASLADRLVRKCDVLNRGFSGYNTRWAKIILPRLIRKGNSLDIPVAVTIFFGANDSALKDENPKQHIPLEEYAANLKSMVQYLKSVDIPENRVILITPTPLCETAWEEQCIIQGCKLNRLNSVVGEYANACLQVAQDCGTDVLDLWTLMQDSQDFSSYLSDGLHLSPKGNEFLFSHLWPLIEKKVSSLPLLLPYWRDVAEAKPELSLLGDGDH

SEQ ID NO: 4236 - protein, 1227 aa, Homo sapiens
MAAVLESLLREEVSVAAVVRWIARSTQGSEDNAGEAAALSSLRALRKEFVPFLLNFLREQSSRVLPQGPPTPAKTPGASAALPGRPGGPPRGSRGARSQLFPPTEAQSTAAEAPLARRGGRRRGPGPARERGGRGLEEGVSGESLPGAGGRRLRGSGSPSRPSLTLSDPPNLSNLEEFPPVGSVPPGPTGTKPSRRINPTPVSEERSLSKPKTCFTSPPISCVPSSQPSALDTSPWGLGLPPGCRSLQEEREMLRKERSKQLQQSPTPTCPTPELGSPLPSRTGSLTDEPADPARVSSRQRLELVALVYSSCIAENLVPNLFLELFFVFQLLTARRMVTAKDSDPELSPAVLDSLESPLFQSIHDCVFFAVQVLECHFQVLSNLDKGTLKLLAENERLLCFSPALQGRLRAAYEGSVAKVSLVMPPSTQAVSFQPETDNRANFSSDRAFHTFKKQRDVFYEVLREWEDHHEEPGWDFEKGLGSRIRAMMGQLSAACSHSHFVRLFQKQLLQMCQSPGGAGGTVLGEAPDVLSMLGADKLGRLWRLQERLMAPQSSGGPCPPPTFPGCQGFFRDFILSASSFQFNQHLMDSLSLKIQELNGLALPQHEPNDEDGESDVDWQGERKQFAVVLLSLRLLAKFLGFVAFLPYRGPEPPPTGELQDSILALRSQVPPVLDVRTLLQRGLQARRAVLTVPWLVEFLSFADHVVPLLEYYRDIFTLLLRLHRSLVLSQESEGKMCFLNKLLLLAVLGWLFQIPTVPEDLFFLEEGPSYAFEVDTVAPEHGLDNAPVVDQQLLYTCCPYIGELRKLLASWVSGSSGRSGGFMRKITPTTTTSLGAQPSQTSQGLQAQLAQAFFHNQPPSLRRTVEFVAERIGSNCVKHIKATLVADLVRQAESLLQEQLVTQGEEGGDPAQLLEILCSQLCPHGAQALALGREFCQRKSPGAVRALLPEETPAAVLSSAENIAVGLATEKACAWLSANITALIRREVKAAVSRTLRAQGPEPAARGERRGCSRACEHHAPLPSHLISEIKDVLSLAVGPRDPDEGVSPEHLEQLLGQLGQTLRCRQFLCPPAEQHLAKCSVELASLLVADQIPILGPPAQYRLERGQARRLLHMLLSLWKEDFQGPVPLQLLLSPRNVGLLADTRPREWDLLLFLLRELVEKGLMGRMEIEACLGSLHQAQWPGDFAEELATLSNLFLAEPHLPEPQLRACELVQPNRGTVLAQS

SEQ ID NO: 4237 - protein, 510 aa, Homo sapiens
MAAELVEAKNMVMSFRVSDLQMLLGFVGRSKSGLKHELVTRALQLVQFDCSPELFKKIKELYETRYAKKNSEPAPQPHRPLDPLTMHSTYDRAGAVPRTPLAGPNIDYPVLYGKYLNGLGRLPAKTLKPEVRLVKLPFFNMLDELLKPTELVPQNNEKLQESPCIFALTPRQVELIRNSRELQPGVKAVQVVLRICYSDTSCPQEDQYPPNIAVKVNHSYCSVPGYYPSNKPGVEPKRPCRPINLTHLMYLSSATNRITVTWGNYGKSYSVALYLVRQLTSSELLQRLKTIGVKHPELCKALVKEKLRLDPDSEIATTGVRVSLICPLVKMRLSVPCRAETCAHLQCFDAVFYLQMNEKKPTWMCPVCDKPAPYDQLIIDGLLSKILSECEDADEIEYLVDGSWCPIRAEKERSCSPQGAILVLGPSDANGLLPAPSVNGSGALGSTGGGGPVGSMENGKPGADVVDLTLDSSSSSEDEEEEEEEEEDEDEEGPRPKRRCPFQKGLVPAC

SEQ ID NO: 4238 - protein, 124 aa, Homo sapiens
MADDLKRFLYKKLPSVEGLHAIVVSDRDGVPVIKVANDNAPEHALRPGFLSTFALATDQGSKLGLSKNKSIICYYNTYQVVQFNRLPLVVSFIASSSANTGLIVSLEKELAPLFEELRQVVEVS

SEQ ID NO: 4239 - protein, 106 aa, Homo sapiens
MPFLDIQKRFGLNIDRWLTIQSGEQPYKMAGRCHAFEKEWIECAHGIGYTRAEKECKIEYDDFVECLLRQKTMRRAGTIRKQRDKLIKEGKYTPPPHHIGKGEPRP

SEQ ID NO: 4240 - protein, 2045 aa, Homo sapiens
MVVSEEEEEEEEEGDEEEEEEVEAADEDDEEDDDEGVLGRGPGHDRGRDRHSPPGCHLFPPPPPPPPPLPPPPPPPPPDKDDIRLLPSALGVKKRKRGPKKQKENKPGKPRKRKKRDSEEEFGSERDEYREKSESGGSEYGTGPGRKRRRKHREKKEKKTKRRKKGEGDGGQKQVEQKSSATLLLTWGLEDVEHVFSEEDYHTLTNYKAFSQFMRPLIAKKNPKIPMSKMMTILGAKWREFSANNPFKGSAAAVAAAAAAAAAAVAEQVSAAVSSATPIAPSGPPALPPPPAADIQPPPIRRAKTKEGKGPGHKRRSKSPRVPDGRKKLRGKKMAPLKIKLGLLGGKRKKGGSYVFQSDEGPEPEAEESDLDSGSVHSASGRPDGPVRTKKLKRGRPGRKKKKVLGCPAVAGEEEVDGYETDHQDYCEVCQQGGEIILCDTCPRAYHLVCLDPELDRAPEGKWSCPHCEKEGVQWEAKEEEEEYEEEGEEEGEKEEEDDHMEYCRVCKDGGELLCCDACISSYHIHCLNPPLPDIPNGEWLCPRCTCPVLKGRVQKILHWRWGEPPVAVPAPQQADGNPDVPPPRPLQGRSEREFFVKWVGLSYWHCSWAKELQLEIFHLVMYRNYQRKNDMDEPPPLDYGSGEDDGKSDKRKVKDPHYAEMEEKYYRFGIKPEWMTVHRIINHSVDKKGNYHYLVKWRDLPYDQSTWEEDEMNIPEYEEHKQSYWRHRELIMGEDPAQPRKYKKKKKELQGDGPPSSPTNDPTVKYETQPRFITATGGTLHMYQLEGLNWLRFSWAQGTDTILADEMGLGKTIQTIVFLYSLYKEGHTKGPFLVSAPLSTIINWEREFQMWAPKFYVVTYTGDKDSRAIIRENEFSFEDNAIKGGKKAFKMKREAQVKFHVLLTSYELITIDQAALGSIRWACLVVDEAHRLKNNQSKFFRVLNGYKIDHKLLLTGTPLQNNLEELFHLLNFLTPERFNNLEGFLEEFADISKEDQIKKLHDLLGPHMLRRLKADVFKNMPAKTELIVRVELSPMQKKYYKYILTRNFEALNSRGGGNQVSLLNIMMDLKKCCNHPYLFPVAAMESPKLPSGAYEGGALIKSSGKLMLLQKMLRKLKEQGHRVLIFSQMTKMLDLLEDFLDYEGYKYERIDGGITGALRQEAIDRFNAPGAQQFCFLLSTRAGGLGINLATADTVIIFDSDWNPHNDIQAFSRAHRIGQANKVMIYRFVTRASVEERITQVAKRKMMLTHLVVRPGLGSKAGSMSKQELDDILKFGTEELFKDENEGENKEEDSSVIHYDNEAIARLLDRNQDATEDTDVQNMNEYLSSFKVAQYVVREEDKIEEIEREIIKQEENVDPDYWEKLLRHHYEQQQEDLARNLGKGKRVRKQVNYNDAAQEDQDNQSEYSVGSEEEDEDFDERPEGRRQSKRQLRNEKDKPLPPLLARVGGNIEVLGFNTRQRKAFLNAVMRWGMPPQDAFTTQWLVRDLRGKTEKEFKAYVSLFMRHLCEPGADGSETFADGVPREGLSRQQVLTRIGVMSLVKKKVQEFEHINGRWSMPELMPDPSADSKRSSRASSPTKTSPTTPEASATNSPCTSKPATPAPSEKGEGIRTPLEKEEAENQEEKPEKNSRIGEKMETEADAPSPAPSLGERLEPRKIPLEDEVPGVPGEMEPEPGYRGDREKSATESTPGERGEEKPLDGQEHRERPEGETGDLGKREDVKGDRELRPGPRDEPRSNGRREEKTEKPRFMFNIADGGFTELHTLWQNEERAAISSGKLNEIWHRRHDYWLLAGIVLHGYARWQDIQNDAQFAIINEPFKTEANKGNFLEMKNKFLARRFKLLEQALVIEEQLRRAAYLNLSQEPAHPAMALHARFAEAECLAESHQHLSKESLAGNKPANAVLHKVLNQLEELLSDMKADVTRLPATLSRIPPIAARLQMSERSILSRLASKGTEPHPTPAYPPGPYATPPGYGAAFSAAPVGALAAAGANYSQMPAGSFITAATNGPPVLVKKEKEMVGALVSDGLDRKEPRAGEVICIDD

SEQ ID NO: 4241 - protein, 2000 aa, Homo sapiens
MKAADTVILWARSKNDQLRISFPPGLCWGDRMPDKDDIRLLPSALGVKKRKRGPKKQKENKPGKPRKRKKRDSEEEFGSERDEYREKSESGGSEYGTGPGRKRRRKHREKKEKKTKRRKKGEGDGGQKQVEQKSSATLLLTWGLEDVEHVFSEEDYHTLTNYKAFSQFMRPLIAKKNPKIPMSKMMTILGAKWREFSANNPFKGSAAAVAAAAAAAAAAVAEQVSAAVSSATPIAPSGPPALPPPPAADIQPPPIRRAKTKEGKGPGHKRRSKSPRVPDGRKKLRGKKMAPLKIKLGLLGGKRKKGGSYVFQSDEGPEPEAEESDLDSGSVHSASGRPDGPVRTKKLKRGRPGRKKKKVLGCPAVAGEEEVDGYETDHQDYCEVCQQGGEIILCDTCPRAYHLVCLDPELDRAPEGKWSCPHCEKEGVQWEAKEEEEEYEEEGEEEGEKEEEDDHMEYCRVCKDGGELLCCDACISSYHIHCLNPPLPDIPNGEWLCPRCTCPVLKGRVQKILHWRWGEPPVAVPAPQQADGNPDVPPPRPLQGRSEREFFVKWVGLSYWHCSWAKELQLEIFHLVMYRNYQRKNDMDEPPPLDYGSGEDDGKSDKRKVKDPHYAEMEEKYYRFGIKPEWMTVHRIINHSVDKKGNYHYLVKWRDLPYDQSTWEEDEMNIPEYEEHKQSYWRHRELIMGEDPAQPRKYKKKKKELQGDGPPSSPTNDPTVKYETQPRFITATGGTLHMYQLEGLNWLRFSWAQGTDTILADEMGLGKTIQTIVFLYSLYKEGHTKGPFLVSAPLSTIINWEREFQMWAPKFYVVTYTGDKDSRAIIRENEFSFEDNAIKGGKKAFKMKREAQVKFHVLLTSYELITIDQAALGSIRWACLVVDEAHRLKNNQSKFFRVLNGYKIDHKLLLTGTPLQNNLEELFHLLNFLTPERFNNLEGFLEEFADISKEDQIKKLHDLLGPHMLRRLKADVFKNMPAKTELIVRVELSPMQKKYYKYILTRNFEALNSRGGGNQVSLLNIMMDLKKCCNHPYLFPVAAMESPKLPSGAYEGGALIKSSGKLMLLQKMLRKLKEQGHRVLIFSQMTKMLDLLEDFLDYEGYKYERIDGGITGALRQEAIDRFNAPGAQQFCFLLSTRAGGLGINLATADTVIIFDSDWNPHNDIQAFSRAHRIGQANKVMIYRFVTRASVEERITQVAKRKMMLTHLVVRPGLGSKAGSMSKQELDDILKFGTEELFKDENEGENKEEDSSVIHYDNEAIARLLDRNQDATEDTDVQNMNEYLSSFKVAQYVVREEDKIEEIEREIIKQEENVDPDYWEKLLRHHYEQQQEDLARNLGKGKRVRKQVNYNDAAQEDQDNQSEYSVGSEEEDEDFDERPEGRRQSKRQLRNEKDKPLPPLLARVGGNIEVLGFNTRQRKAFLNAVMRWGMPPQDAFTTQWLVRDLRGKTEKEFKAYVSLFMRHLCEPGADGSETFADGVPREGLSRQQVLTRIGVMSLVKKKVQEFEHINGRWSMPELMPDPSADSKRSSRASSPTKTSPTTPEASATNSPCTSKPATPAPSEKGEGIRTPLEKEEAENQEEKPEKNSRIGEKMETEADAPSPAPSLGERLEPRKIPLEDEVPGVPGEMEPEPGYRGDREKSATESTPGERGEEKPLDGQEHRERPEGETGDLGKREDVKGDRELRPGPRDEPRSNGRREEKTEKPRFMFNIADGGFTELHTLWQNEERAAISSGKLNEIWHRRHDYWLLAGIVLHGYARWQDIQNDAQFAIINEPFKTEANKGNFLEMKNKFLARRFKLLEQALVIEEQLRRAAYLNLSQEPAHPAMALHARFAEAECLAESHQHLSKESLAGNKPANAVLHKVLNQLEELLSDMKADVTRLPATLSRIPPIAARLQMSERSILSRLASKGTEPHPTPAYPPGPYATPPGYGAAFSAAPVGALAAAGANYSQMPAGSFITAATNGPPVLVKKEKEMVGALVSDGLDRKEPRAGEVICIDD

SEQ ID NO: 4242 - protein, 1966 aa, Homo sapiens
MKAADTVILWARSKNDQLRISFPPGLCWGDRMPDKDDIRLLPSALGVKKRKRGPKKQKENKPGKPRKRKKRDSEEEFGSERDEYREKSESGGSEYGTGPGRKRRRKHREKKEKKTKRRKKGEGDGGQKQVEQKSSATLLLTWGLEDVEHVFSEEDYHTLTNYKAFSQFMRPLIAKKNPKIPMSKMMTILGAKWREFSANNPFKGSAAAVAAAAAAAAAAVAEQVSAAVSSATPIAPSGPPALPPPPAADIQPPPIRRAKTKEGKGPGHKRRSKSPRVPDGRKKLRGKKMAPLKIKLGLLGGKRKKGGSYVFQSDEGPEPEAEESDLDSGSVHSASGRPDGPVRTKKLKRGRPGRKKKKVLGCPAVAGEEEVDGYETDHQDYCEVCQQGGEIILCDTCPRAYHLVCLDPELDRAPEGKWSCPHCEKEGVQWEAKEEEEEYEEEGEEEGEKEEEDDHMEYCRVCKDGGELLCCDACISSYHIHCLNPPLPDIPNGEWLCPRCTCPVLKGRVQKILHWRWGEPPVAVPAPQQADGNPDVPPPRPLQGRSEREFFVKWVGLSYWHCSWAKELQLEIFHLVMYRNYQRKNDMDEPPPLDYGSGEDDGKSDKRKVKDPHYAEMEEKYYRFGIKPEWMTVHRIINHSVDKKGNYHYLVKWRDLPYDQSTWEEDEMNIPEYEEHKQSYWRHRELIMGEDPAQPRKYKKKKKELQGDGPPSSPTNDPTVKYETQPRFITATGGTLHMYQLEGLNWLRFSWAQGTDTILADEMGLGKTIQTIVFLYSLYKEGHTKGPFLVSAPLSTIINWEREFQMWAPKFYVVTYTGDKDSRAIIRENEFSFEDNAIKGGKKAFKMKREAQVKFHVLLTSYELITIDQAALGSIRWACLVVDEAHRLKNNQSKFFRVLNGYKIDHKLLLTGTPLQNNLEELFHLLNFLTPERFNNLEGFLEEFADISKEDQIKKLHDLLGPHMLRRLKADVFKNMPAKTELIVRVELSPMQKKYYKYILTRNFEALNSRGGGNQVSLLNIMMDLKKCCNHPYLFPVAAMESPKLPSGAYEGGALIKSSGKLMLLQKMLRKLKEQGHRVLIFSQMTKMLDLLEDFLDYEGYKYERIDGGITGALRQEAIDRFNAPGAQQFCFLLSTRAGGLGINLATADTVIIFDSDWNPHNDIQAFSRAHRIGQANKVMIYRFVTRASVEERITQVAKRKMMLTHLVVRPGLGSKAGSMSKQELDDILKFGTEELFKDENEGENKEEDSSVIHYDNEAIARLLDRNQDATEDTDVQNMNEYLSSFKVAQYVVREEDKIEEIEREIIKQEENVDPDYWEKLLRHHYEQQQEDLARNLGKGKRVRKQVNYNDAAQEDQDNQSEYSVGSEEEDEDFDERPEGRRQSKRQLRNEKDKPLPPLLARVGGNIEVLGFNTRQRKAFLNAVMRWGMPPQDAFTTQWLVRDLRGKTEKEFKAYVSLFMRHLCEPGADGSETFADGVPREGLSRQQVLTRIGVMSLVKKKVQEFEHINGRWSMPELMPDPSADSKRSSRASSPTKTSPTTPEASATNSPCTSKPATPAPSEKGEGIRTPLEKEEAENQEEKPEKNSRIGEKMETEADAPSPAPSLGERLEPRKIPLEDEVPGVPGEMEPEPGYRGDREKSEDVKGDRELRPGPRDEPRSNGRREEKTEKPRFMFNIADGGFTELHTLWQNEERAAISSGKLNEIWHRRHDYWLLAGIVLHGYARWQDIQNDAQFAIINEPFKTEANKGNFLEMKNKFLARRFKLLEQALVIEEQLRRAAYLNLSQEPAHPAMALHARFAEAECLAESHQHLSKESLAGNKPANAVLHKVLNQLEELLSDMKADVTRLPATLSRIPPIAARLQMSERSILSRLASKGTEPHPTPAYPPGPYATPPGYGAAFSAAPVGALAAAGANYSQMPAGSFITAATNGPPVLVKKEKEMVGALVSDGLDRKEPRAGEVICIDD

SEQ ID NO: 4243 - protein, 308 aa, Homo sapiens
MDALKSAGRALIRSPSLAKQSWGGGGRHRKLPENWTDTRETLLEGMLFSLKYLGMTLVEQPKGEELSAAAIKRIVATAKASGKKLQKVTLKVSPRGIILTDNLTNQLIENVSIYRISYCTADKMHDKVFAYIAQSQHNQSLECHAFLCTKRKMAQAVTLTVAQAFKVAFEFWQVSKEEKEKRDKASQEGGDVLGARQDCTPPLKSLVATGNLLDLEETAKAPLSTVSANTTNMDEVPRPQALSGSSVVWELDDGLDEAFSRLAQSRTNPQVLDTGLTAQDMHYAQCLSPVDWDKPDSSGTEQDDLFSF

SEQ ID NO: 4244 - protein, 459 aa, Homo sapiens
MLRWLIGGGREPQGLAEKSPLQTIGEEQTQNPYTELLVLKAHHDIVRFLVQLDDYRFASAGDDGIVVVWNAQTGEKLLELNGHTQKITAIITFPSLESCEEKNQLILTASADRTVIVWDGDTTRQVQRISCFQSTVKCLTVLQRLDVWLSGGNDLCVWNRKLDLLCKTSHLSDTGISALVEIPKNCVVAAVGKELIIFRLVAPTEGSLEWDILEVKRLLDHQDNILSLINVNDLSFVTGSHVGELIIWDALDWTMQAYERNFWDPSPQLDTQQEIKLCQKSNDISIHHFTCDEENVFAAVGRGLYVYSLQMKRVIACQKTAHDSNVLHVARLPNRQLISCSEDGSVRIWELREKQQLAAEPVPTGFFNMWGFGRVSKQASQPVKKQQENATSCSLELIGDLIGHSSSVEMFLYFEDHGLVTCSADHLIILWKNGERESGLRSLRLFQKLEENGDLYLAV

SEQ ID NO: 4245 - protein, 140 aa, Homo sapiens
MAGWNAYIDNLMADGTCQDAAIVGYKDSPSVWAAVPGKTFVNITPAEVGVLVGKDRSSFYVNGLTLGGQKCSVIRDSLLQDGEFSMDLRTKSTGGAPTFNVTVTKTDKTLVLLMGKEGVHGGLINKKCYEMASHLRRSQY

SEQ ID NO: 4246 - protein, 308 aa, Homo sapiens
MAGKKNVLSSLAVYAEDSEPESDGEAGIEAVGSAAEEKGGLVSDAYGEDDFSRLGGDEDGYEEEEDENSRQSEDDDSETEKPEADDPKDNTEAEKRDPQELVASFSERVRNMSPDEIKIPPEPPGRCSNHLQDKIQKLYERKIKEGMDMNYIIQRKKEFRNPSIYEKLIQFCAIDELGTNYPKDMFDPHGWSEDSYYEALAKAQKIEMDKLEKAKKERTKIEFVTGTKKGTTTNATSTTTTTASTAVADAQKRKSKWDSAIPVTTIAQPTILTTTATLPAVVTVTTSASGSKTTVISAVGTIVKKAKQ

SEQ ID NO: 4247 - protein, 233 aa, Homo sapiens
MEEAILVPCVLGLLLLPILAMLMALCVHCHRLPGSYDSTSSDSLYPRGIQFKRPHTVAPWPPAYPPVTSYPPLSQPDLLPIPRSPQPLGGSHRTPSSRRDSDGANSVASYENEEPACEDADEDEDDYHNPGYLVVLPDSTPATSTAAPSAPALSTPGIRDSAFSMESIDDYVNVPESGESAEASLDGSREYVNVSQELHPGAAKTEPAALSSQEAEEVEEEGAPDYENLQELN

SEQ ID NO: 4248 - protein, 232 aa, Homo sapiens
MEEAILVPCVLGLLLLPILAMLMALCVHCHRLPGSYDSTSSDSLYPRGIQFKRPHTVAPWPPAYPPVTSYPPLSQPDLLPIPSPQPLGGSHRTPSSRRDSDGANSVASYENEEPACEDADEDEDDYHNPGYLVVLPDSTPATSTAAPSAPALSTPGIRDSAFSMESIDDYVNVPESGESAEASLDGSREYVNVSQELHPGAAKTEPAALSSQEAEEVEEEGAPDYENLQELN

SEQ ID NO: 4249 - protein, 233 aa, Homo sapiens; identical to SEQ ID NO: 4247

SEQ ID NO: 4250 - protein, 262 aa, Homo sapiens
MEEAILVPCVLGLLLLPILAMLMALCVHCHRLPGSYDSTSSDSLYPRGIQFKRPHTVAPWPPAYPPVTSYPPLSQPDLLPIPRSPQPLGGSHRTPSSRRDSDGANSVASYENEGASGIRGAQAGWGVWGPSWTRLTPVSLPPEPACEDADEDEDDYHNPGYLVVLPDSTPATSTAAPSAPALSTPGIRDSAFSMESIDDYVNVPESGESAEASLDGSREYVNVSQELHPGAAKTEPAALSSQEAEEVEEEGAPDYENLQELN

SEQ ID NO: 4251 - protein, 847 aa, Homo sapiens
MAQAIFEALEGMDNQTVLAVQSLLDGQGAVPDPTGQSVNAPPAIQPLDDEDVFLCGKCKKQFNSLPAFMTHKREQCQGNAPALATVSLATNSIYPPSAAPTAVQQAPTPANRQISTYITVPPSPLIQTLVQGNILVSDDVLMSAMSAFTSLDQPMPQGPPPVQSSLNMHSVPSYLTQPPPPPPPPPPLPPPPPPQPPPPPPQSLGPPGRPNPGGNGVVEVYSAAAPLAGSGTVEIQALGMQPYPPLEVPNQCVEPPVYPTPTVYSPGKQGFKPKGPNPAAPMTSATGGTVATFDSPATLKTRRAKAAGKPKAQKLKCSYCDKSFTKNFDLQQHIRSHTGEKPFQCIACGRAFAQKSNVKKHMQTHKVWPPGHSGGTVSRNSVTVQVMALNPSRQEDEESTGLGQPLPGAPQPQALSTAGEEEGDKPESKQVVLIDSSYLCQFCPSKFSTYFQLKSHMTQHKNEQVYKCVVKSCAQTFPKLDTFLEHIKSHQEELSYRCHLCGKDFPSLYDLGVHQYSHSLLPQHSPKKDNAVYKCVKCVNKYSTPEALEHHLQTATHNFPCPHCQKVFPCERYLRRHLPTHGSGGRFKCQVCKKFFRREHYLKLHAHIHSGEKPYKCSVCESAFNRKDKLKRHMLIHEPFKKYKCPFSTHTGCSKEFNRPDKLKAHILSHSGMKLHKCALCSKSFSRRAHLAEHQRAHTGNYKFRCAGCAKGFSRHKYLKDHRCRLGPQKDKDLQTRRPPQRRAAPRSCGSGGRKVLTPLPDPLGLEELKDTGAGLVPEAVPGKPPFAEPDAVLSIVVGGAVGAETELVVPGHAEGLGSNLALAELQAGAEGPCAMLAVPVYIQASE

SEQ ID NO: 4252 - protein, 613 aa, Homo sapiens
MAATAVAAAVAGTESAQGPPGPAASLELWLNKATDPSMSEQDWSAIQNFCEQVNTDPNGPTHAPWLLAHKIQSPQEKEALYALTVLEMCMNHCGEKFHSEVAKFRFLNELIKVLSPKYLGSWATGKVKGRVIEILFSWTVWFPEDIKIRDAYQMLKKQGIIKQDPKLPVDKILPPPSPWPKSSIFDADEEKSKLLTRLLKSNHPEDLQAANRLIKNLVKEEQEKSEKVSKRVSAVEEVRSHVKVLQEMLSMYRRPGQAPPDQEALQVVYERCEKLRPTLFRLASDTTDDDDALAEILQANDLLTQGVLLYKQVMEGRVTFGNRVTSSLGDIPVSRVFQNPAGCMKTCPLIDLEVDNGPAQMGTVVPSLLHQDLAALGISDAPVTGMVSGQNCCEEKRNPSSSTLPGGGVQNPSADRNLLDLLSAQPAPCPLNYVSQKSVPKEVPPGTKSSPGWSWEAGPLAPSPSSQNTPLAQVFVPLESVKPSSLPPLIVYDRNGFRILLHFSQTGAPGHPEVQVLLLTMMSTAPQPVWDIMFQVAVPKSMRVKLQPASSSKLPAFSPLMPPAVISQMLLLDNPHKEPIRLRYKLTFNQGGQPFSEVGEVKDFPDLAVLGAA

SEQ ID NO: 4253 - protein, 541 aa, Homo sapiens
MPGRCQSDAAMRVNGPASRAPAGWTSGSLHTGPRAGRPRAQARGVRGRGLLLRPRPAKELPLPRKGGAWAPAGNPGPLHPLGVAVGMAGSGRLVLRPWIRELILGSETPSSPRAGQLLEDAEAAVAGPSHAPDTSDVGATLLVSDGTHSVRCLVTREALDTSDWEEKEFGFRGTEGRLLLLQDCGVHVQVAEGGAPAEFYLQVDRFSLLPTEQPRLRVPGRNQDLDVQKKLYDCLEEHLSESTSSNAGLSLSQLLDEMREDQEHQGALVCLAESCLTLEGPCTAPPVTHWAASRCKATGEAVYTVPSSMLCISENDQLILSSLGPCQRTQGPELPPPDPALQDLSLTLIASPPSSPSSSGTPALPGHMSSEESGTSISLLPALSLAAPDPGQRSSSQPSPAICSAPATLTPRSPHASRTPSSPLQSCTPSLSPRSHVPSPHQALVTRPQKPSLEFKEFVGLPCKNRPPFPRTGATRGAQEPCSVWEPPKRHRDGSAFQYEYEPPCTSLCARVQAVRLPPQLMAWALHFLMDAQPGSEPTPM

SEQ ID NO: 4254 - protein, 3664 aa, Homo sapiens
MVRETRHLWVGNLPENVREEKIIEHFKRYGRVESVKILPKRGSEGGVAAFVDFVDIKSAQKAHNSVNKMGDRDLRTDYNEPGTIPSAARGLDDTVSIASRSREVSGFRGGGGGPAYGPPPSLHAREGRYERRLDGASDNRERAYEHSAYGHHERGTGGFDRTRHYDQDYYRDPRERTLQHGLYYASRSRSPNRFDAHDPRYEPRAREQFTLPSVVHRDIYRDDITREVRGRRPERNYQHSRSRSPHSSQSRNQSPQRLASQASRPTRSPSGSGSRSRSSSSDSISSSSSTSSDSSDSSSSSSDDSPARSVQSAAVPAPTSQLLSSLEKDEPRKSFGIKVQNLPVRSTDTSLKDGLFHEFKKFGKVTSVQIHGTSEERYGLVFFRQQEDQEKALTASKGKLFFGMQIEVTAWIGPETESENEFRPLDERIDEFHPKATRTLFIGNLEKTTTYHDLRNIFQRFGEIVDIDIKKVNGVPQYAFLQYCDIASVCKAIKKMDGEYLGNNRLKLGFGKSMPTNCVWLDGLSSNVSDQYLTRHFCRYGPVVKVVFDRLKGMALVLYNEIEYAQAAVKETKGRKIGGNKIKVDFANRESQLAFYHCMEKSGQDIRDFYEMLAERREERRASYDYNQDRTYYESVRTPGTYPEDSRRDYPARGREFYSEWETYQGDYYESRYYDDPREYRDYRNDPYEQDIREYSYRQRERERERERFESDRDRDHERRPIERSQSPVHLRRPQSPGASPSQAERLPSDSERRLYSRSSDRSGSCSSLSPPRYEKLDKSRLERYTKNEKTDKERTFDPERVERERRLIRKEKVEKDKTDKQKRKGKVHSPSSQSSETDQENEREQSPEKPRSCNKLSREKADKEGIAKNRLELMPCVVLTRVKEKEGKVIDHTPVEKLKAKLDNDTVKSSALDQKLQVSQTEPAKSDLSKLESVRMKVPKEKGLSSHVEVVEKEGRLKARKHLKPEQPADGVSAVDLEKLEARKRRFADSNLKAEKQKPEVKKSSPEMEDARVLSKKQPDVSSREVILLREGEAERKPVRKEILKRESKKIKLDRLNTVASPKDCQELASISVGSGSRPSSDLQARLGELAGESVENQEVQSKKPIPSKPQLKQLQVLDDQGPEREDVRKNYCSLRDETPERKSGQEKSHSVNTEEKIGIDIDHTQSYRKQMEQSRRKQQMEMEIAKSEKFGSPKKDVDEYERRSLVHEVGKPPQDVTDDSPPSKKKRMDHVDFDICTKRERNYRSSRQISEDSERTGGSPSVRHGSFHEDEDPIGSPRLLSVKGSPKVDEKVLPYSNITVREESLKFNPYDSSRREQMADMAKIKLSVLNSEDELNRWDSQMKQDAGRFDVSFPNSIIKRDSLRKRSVRDLEPGEVPSDSDEDGEHKSHSPRASALYESSRLSFLLRDREDKLRERDERLSSSLERNKFYSFALDKTITPDTKALLERAKSLSSSREENWSFLDWDSRFANFRNNKDKEKVDSAPRPIPSWYMKKKKIRTDSEGKMDDKKEDHKEEEQERQELFASRFLHSSIFEQDSKRLQHLERKEEDSDFISGRIYGKQTSEGANSTTDSIQEPVVLFHSRFMELTRMQQKEKEKDQKPKEVEKQEDTENHPKTPESAPENKDSELKTPPSVGPPSVTVVTLESAPSALEKTTGDKTVEAPLVTEEKTVEPATVSEEAKPASEPAPAPVEQLEQVDLPPGADPDKEAAMMPAGVEEGSSGDQPPYLDAKPPTPGASFSQAESNVDPEPDSTQPLSKPAQKSEEANEPKAEKPDATADAEPDANQKAEAAPESQPPASEDLEVDPPVAAKDKKPNKSKRSKTPVQAAAVSIVEKPVTRKSERIDREKLKRSNSPRGEAQKLLELKMEAEKITRTASKNSAADLEHPEPSLPLSRTRRRNVRSVYATMGDHENRSPVKEPVEQPRVTRKRLERELQEAAAVPTTPRRGRPPKTRRRADEEEENEAKEPAETLKPPEGWRSPRSQKTAAGGGPQGKKGKNEPKVDATRPEATTEVGPQIGVKESSMEPKAAEEEAGSEQKRDRKDAGTDKNPPETAPVEVVEKKPAPEKNSKSKRGRSRNSRLAVDKSASLKNVDAAVSPRGAAAQAGERESGVVAVSPEKSESPQKEDGLSSQLKSDPVDPDKEPEKEDVSASGPSPEATQLAKQMELEQAVEHIAKLAEASASAAYKADAPEGLAPEDRDKPAHQASETELAAAIGSIINDISGEPENFPAPPPYPGESQTDLQPPAGAQALQPSEEGMETDEAVSGILETEAATESSRPPVNAPDPSAGPTDTKEARGNSSETSHSVPEAKGSKEVEVTLVRKDKGRQKTTRSRRKRNTNKKVVAPVESHVPESNQAQGESPAANEGTTVQHPEAPQEEKQSEKPHSTPPQSCTSDLSKIPSTENSSQEISVEERTPTKASVPPDLPPPPQPAPVDEEPQARFRVHSIIESDPVTPPSDPSIPIPTLPSVTAAKLSPPVASGGIPHQSPPTKVTEWITRQEEPRAQSTPSPALPPDTKASDVDTSSSTLRKILMDPKYVSATSVTSTSVTTAIAEPVSAAPCLHEAPPPPVDSKKPLEEKTAPPVTNNSEIQASEVLVAADKEKVAPVIAPKITSVISRMPVSIDLENSQKITLAKPAPQTLTGLVSALTGLVNVSLVPVNALKGPVKGSVTTLKSLVSTPAGPVNVLKGPVNVLTGPVNVLTTPVNATVGTVNAAPGTVNAAASAVNATASAVTVTAGAVTAASGGVTATTGTVTMAGAVIAPSTKCKQRASANENSRFHPGSMPVIDDRPADAGSGAGLRVNTSEGVVLLSYSGQKTEGPQRISAKISQIPPASAMDIEFQQSVSKSQVKPDSVTASQPPSKGPQAPAGYANVATHSTLVLTAQTYNASPVISSVKADRPSLEKPEPIHLSVSTPVTQGGTVKVLTQGINTPPVLVHNQLVLTPSIVTTNKKLADPVTLKIETKVLQPANLGSTLTPHHPPALPSKLPTEVNHVPSGPSIPADRTVSHLAAAKLDAHSPRPSGPGPSSFPRASHPSSTASTALSTNATVMLAAGIPVPQFISSIHPEQSVIMPPHSITQTVSLSHLSQGEVRMNTPTLPSITYSIRPEALHSPRAPLQPQQIEVRAPQRASTPQPAPAGVPALASQHPPEEEVHYHLPVARATAPVQSEVLVMQSEYRLHPYTVPRDVRIMVHPHVTAVSEQPRAADGVVKVPPASKAPQQPGKEAAKTPDAKAAPTPTPAPVPVPVPLPAPAPAPHGEARILTVTPSNQLQGLPLTPPVVVTHGVQIVHSSGELFQEYRYGDIRTYHPPAQLTHTQFPAASSVGLPSRTKTAAQGPPPEGEPLQPPQPVQSTQPAQPAPPCPPSQLGQPGQPPSSKMPQVSQEAKGTQTGVEQPRLPAGPANRPPEPHTQVQRAQAETGPTSFPSPVSVSMKPDLPVSLPTQTAPKQPLFVPTTSGPSTPPGLVLPHTEFQPAPKQDSSPHLTSQRPVDMVQLLKKYPIVWQGLLALKNDTAAVQLHFVSGNNVLAHRSLPLSEGGPPLRIAQRMRLEATQLEGVARRMTVETDYCLLLALPCGRDQEDVVSQTESLKAAFITYLQAKQAAGIINVPNPGSNQPAYVLQIFPPCEFSESHLSRLAPDLLASISNISPHLMIVIASV

SEQ ID NO: 4255 - protein, 360 aa, Homo sapiens
MSLVDLGKKLLEAARAGQDDEVRILMANGAPFTTDWLGTSPLHLAAQYGHYSTTEVLLRAGVSRDARTKVDRTPLHMAASEGHASIVEVLLKHGADVNAKDMLKMTALHWATEHNHQEVVELLIKYGADVHTQSKFCKTAFDISIDNGNEDLAEILQIAMQNQINTNPESPDTVTIHAATPQFIIGPGGVVNLTGLVSSENSSKATDETGVSAVQFGNSSTSVLATLAALAEASAPLSNSSETPVVATEEVVTAESVDGAIQQVVSSGGQQVITIVTDGIQLGNLHSIPTSGIGQPIIVTMPDGQQVLTVPATDIAEETVISEEPPAKRQCIEIIENRVESAEIEVRSLLPGVLCRSHPK

SEQ ID NO: 4256 - protein, 395 aa, Homo sapiens
MSLVDLGKKLLEAARAGQDDEVRILMANGAPFTTDWLGTSPLHLAAQYGHYSTTEVLLRAGVSRDARTKVDRTPLHMAASEGHASIVEVLLKHGADVNAKDMLKMTALHWATEHNHQEVVELLIKYGADVHTQSKFCKTAFDISIDNGNEDLAEILQIAMQNQINTNPESPDTVTIHAATPQFIIGPGGVVNLTGLVSSENSSKATDETGVSAVQFGNSSTSVLATLAALAEASAPLSNSSETPVVATEEVVTAESVDGAIQQVVSSGGQQVITIVTDGIQLGNLHSIPTSGIGQPIIVTMPDGQQVLTVPATDIAEETVISEEPPAKRQCIEIIENRVESAEIEEREALQKQLDEANREAQKYRQQLLKKEQEAEAYRQKLEAMTRLQTNKEAV

SEQ ID NO: 4257 - protein, 383 aa, Homo sapiens
MSLVDLGKKLLEAARAGQDDEVRILMANGAPFTTDWLGTSPLHLAAQYGHYSTTEVLLRAGVSRDARTKVDRTPLHMAASEGHASIVEVLLKHGADVNAKDMLKMTALHWATEHNHQEVVELLIKYGADVHTQSKFCKTAFDISIDNGNEDLAEILQIAMQNQINTNPESPDTVTIHAATPQFIIGPGGVVNLTDETGVSAVQFGNSSTSVLATLAALAEASAPLSNSSETPVVATEEVVTAESVDGAIQQVVSSGGQQVITIVTDGIQLGNLHSIPTSGIGQPIIVTMPDGQQVLTVPATDIAEETVISEEPPAKRQCIEIIENRVESAEIEEREALQKQLDEANREAQKYRQQLLKKEQEAEAYRQKLEAMTRLQTNKEAV

SEQ ID NO: 4258 - protein, 348 aa, Homo sapiens
MSLVDLGKKLLEAARAGQDDEVRILMANGAPFTTDWLGTSPLHLAAQYGHYSTTEVLLRAGVSRDARTKVDRTPLHMAASEGHASIVEVLLKHGADVNAKDMLKMTALHWATEHNHQEVVELLIKYGADVHTQSKFCKTAFDISIDNGNEDLAEILQIAMQNQINTNPESPDTVTIHAATPQFIIGPGGVVNLTDETGVSAVQFGNSSTSVLATLAALAEASAPLSNSSETPVVATEEVVTAESVDGAIQQVVSSGGQQVITIVTDGIQLGNLHSIPTSGIGQPIIVTMPDGQQVLTVPATDIAEETVISEEPPAKRQCIEIIENRVESAEIEVRSLLPGVLCRSHPK

SEQ ID NO: 4259 - protein, 348 aa, Homo sapiens; identical to SEQ ID NO: 4258

SEQ ID NO: 4260 - protein, 273 aa, Homo sapiens
MKRQGASSERKRARIPSGKAGAANGFLMEVCVDSVESAVNAERGGADRIELCSGLSEGGTTPSMGVLQVVKQSVQIPVFVMIRPRGGDFLYSDREIEVMKADIRLAKPYGADGLVFGALTEDGHIDKELCMSLMAICRPLPVTFHRAFDMVHDPMAALETLLTLGFERVLTSGCDSSALEGLPLINRLIEQAKGRIVVMPGGGITDRNLQRILEGSGATEFHCSARSTRDSGMKFRNSSVAMGASLSCSEYSLKVTDVTKVRTLNAIAKNILV

SEQ ID NO: 4261 - protein, 192 aa, Homo sapiens
MACGATLKRPMEFEAALLSPGSPKRRRCAPLPGPTPGLRPPDAEPPPPFQTQTPPQSLQQPAPPGSERRLPTPEQIFQNIKQEYSRYQRWRHLEVVLNQSEACASESQPHSSALTAPSSPGSSWMKKDQPTFTLRQVGIICERLLKDYEDKIREEYEQILNTKLAEQYESFVKFTHDQIMRRYGTRPTSYVS

SEQ ID NO: 4262 - protein, 736 aa, Homo sapiens
MAGSSTGGGGVGETKVIYHLDEEETPYLVKIPVPAERITLGDFKSVLQRPAGAKYFFKSMDQDFGVVKEEISDDNARLPCFNGRVVSWLVSSDNPQPEMAPPVHEPRAELAPPAPPLPPLPPERTSGIGDSRPPSFHPNVSSSHENLEPETETESVVSLRRERPRRRDSSEHGAGGHRTGGPSRLERHLAGYESSSTLMTSELESTSLGDSDEEDTMSRFSSSTEQSSASRLLKRHRRRRKQRPPRLERTSSFSSVTDSTMSLNIITVTLNMEKYNFLGISIVGQSNERGDGGIYIGSIMKGGAVAADGRIEPGDMLLQVNDMNFENMSNDDAVRVLRDIVHKPGPIVLTVAKCWDPSPQAYFTLPRNEPIQPIDPAAWVSHSAALTGTFPAYPGSSSMSTITSGSSLPDGCEGRGLSVHTDMASVTKAMAAPESGLEVRDRMWLKITIPNAFLGSDVVDWLYHHVEGFPERREARKYASGLLKAGLIRHTVNKITFSEQCYYVFGDLSGGCESYLVNLSLNDNDGSSGASDQDTLAPLPGATPWPLLPTFSYQYPAPHPYSPQPPPYHELSSYTYGGGSASSQHSEGSRSSGSTRSDGGAGRTGRPEERAPESKSGSGSESEPSSRGGSLRRGGEASGTSDGGPPPSRGSTGGAPNLRAHPGLHPYGPPPGMALPYNPMMVVMMPPPPPPVPPAVQPPGAPPVRDLGSVPPELTASRQSFHMAMGNPSEFFVDVM

SEQ ID NO: 4263 - protein, 676 aa, Homo sapiens
MSRRALRRLRGEQRGQEPLGPGALHFDLRDDDDAEEEGPKRELGVRRPGGAGKEGVRVNNRFELINIDDLEDDPVVNGERSGCALTDAVAPGNKGRGQRGNTESKTDGDDTETVPSEQSHASGKLRKKKKKQKNKKSSTGEASENGLEDIDRILERIEDSTGLNRPGPAPLSSRKHVLYVEHRHLNPDTELKRYFGARAILGEQRPRQRQRVYPKCTWLTTPKSTWPRYSKPGLSMRLLESKKGLSFFAFEHSEEYQQAQHKFLVAVESMEPNNIVVLLQTSPYHVDSLLQLSDACRFQEDQEMARDLVERALYSMECAFHPLFSLTSGACRLDYRRPENRSFYLALYKQMSFLEKRGCPRTALEYCKLILSLEPDEDPLCMLLLIDHLALRARNYEYLIRLFQEWEAHRNLSQLPNFAFSVPLAYFLLSQQTDLPECEQSSARQKASLLIQQALTMFPGVLLPLLESCSVRPDASVSSHRFFGPNAEISQPPALSQLVNLYLGRSHFLWKEPATMSWLEENVHEVLQAVDAGDPAVEACENRRKVLYQRAPRNIHRHVILSEIKEAVAALPPDVTTQSVMGFDPLPPSDTIYSYVRPERLSPISHGNTIALFFRSLLPNYTMEGERPEEGVAGGLNRNQGLNRLMLAVRDMMANFHLNDLEAPHEDDAEGEGEWD

SEQ ID NO: 4264 - protein, 537 aa, Homo sapiens
MAHCVTLVQLSISCDHLIDKDIGSKSDPLCVLLQDVGGGSWAELGRTERVRNCSSPEFSKTLQLEYRFETVQKLRFGIYDIDNKTPELRDDDFLGGAECSLGQIVSSQVLTLPLMLKPGKPAGRGTITVSAQELKDNRVVTMEVEARNLDKKDFLGKSDPFLEFFRQGDGKWHLVYRSEVIKNNLNPTWKRFSVPVQHFCGGNPSTPIQVQCSDYDSDGSHDLIGTFHTSLAQLQAVPAEFECIHPEKQQKKKSYKNSGTIRVKICRVETEYSFLDYVMGGCQINFTVGVDFTGSNGDPSSPDSLHYLSPTGVNEYLMALWSVGSVVQDYDSDKLFPAFGFGAQVPPDWQVSHEFALNFNPSNPYCAGIQGIVDAYRQALPQVRLYGPTNFAPIINHVARFAAQAAHQGTASQYFMLLLLTDGAVTDVEATREAVVRASNLPMSVIIVGVGGADFEAMEQLDADGGPLHTRSGQAAARDIVQFVPYRRFQNAPREALAQTVLAEVPTQLVSYFRAQGWAPLKPLPPSAKDPAQAPQA

SEQ ID NO: 4265 - protein, 537 aa, Homo sapiens; identical to SEQ ID NO: 4264

SEQ ID NO: 4266 - protein, 537 aa, Homo sapiens; identical to SEQ ID NO: 4264

SEQ ID NO: 4267 - protein, 537 aa, Homo sapiens; identical to SEQ ID NO: 4264

SEQ ID NO: 4268 - protein, 537 aa, Homo sapiens; identical to SEQ ID NO: 4264

SEQ ID NO: 4269 - protein, 537 aa, Homo sapiens; identical to SEQ ID NO: 4264

SEQ ID NO: 4270 - protein, 537 aa, Homo sapiens; identical to SEQ ID NO: 4264

SEQ ID NO: 4271 - protein, 537 aa, Homo sapiens; identical to SEQ ID NO: 4264

SEQ ID NO: 4272 - protein, 262 aa, Homo sapiens
MRNSYRFLASSLSVVVSLLLIPEDVCEKIIGGNEVTPHSRPYMVLLSLDRKTICAGALIAKDWVLTAAHCNLNKRSQVILGAHSITREEPTKQIMLVKKEFPYPCYDPATREGDLKLLQLTEKAKINKYVTILHLPKKGDDVKPGTMCQVAGWGRTHNSASWSDTLREVNITIIDRKVCNDRNHYNFNPVIGMNMVCAGSLRGGRDSCNGDSGSPLLCEGVFRGVTSFGLENKCGDPRGPGVYILLSKKHLNWIIMTIKGAV

SEQ ID NO: 4273 - protein, 648 aa, Homo sapiens
MSWLFGVNKGPKGEGAGPPPPLPPAQPGAEGGGDRGLGDRPAPKDKWSNFDPTGLERAAKAARELEHSRYAKEALNLAQMQEQTLQLEQQSKLKEYEAAVEQLKSEQIRAQAEERRKTLSEETRQHQARAQYQDKLARQRYEDQLKQQQLLNEENLRKQEESVQKQEAMRRATVEREMELRHKNEMLRVETEARARAKAERENADIIREQIRLKASEHRQTVLESIRTAGTLFGEGFRAFVTDRDKVTATVAGLTLLAVGVYSAKNATAVTGRFIEARLGKPSLVRETSRITVLEALRHPIQVSRRLLSRPQDVLEGVVLSPSLEARVRDIAIATRNTKKNRGLYRHILLYGPPGTGKTLFAKKLALHSGMDYAIMTGGDVAPMGREGVTAMHKLFDWANTSRRGLLLFMDEADAFLRKRATEEISKDLRATLNAFLYHMGQHSNKFMLVLASNLPEQFDCAINSRIDVMVHFDLPQQEERERLVRLHFDNCVLKPATEGKRRLKLAQFDYGRKCSEVARLTEGMSGREIAQLAVSWQATAYASKDGVLTEAMMDACVQDAVQQYRQKMRWLKAEGPGRGVEHPLSGVQGETLTSWSLATDPSYPCLAGPCTFRICSWMGTGLCPGPLSPRMSCGGGRPFCPPGHPLL

SEQ ID NO: 4274 - protein, 626 aa, Homo sapiens
MAGERPPLRGPGPGPGEVPGEGPPGPGGTGGGPGRGRPSSYRALRSAVSSLARVDDFHCAEKIGAGFFSEVYKVRHRQSGQVMVLKMNKLPSNRGNTLREVQLMNRLRHPNILRFMGVCVHQGQLHALTEYMNGGTLEQLLSSPEPLSWPVRLHLALDIARGLRYLHSKGVFHRDLTSKNCLVRREDRGFTAVVGDFGLAEKIPVYREGARKEPLAVVGSPYWMAPEVLRGELYDEKADVFAFGIVLCELIARVPADPDYLPRTEDFGLDVPAFRTLVGDDCPLPFLLLAIHCCNLEPSTRAPFTEITQHLEWILEQLPEPAPLTRTALTHNQGSVARGGPSATLPRPDPRLSRSRSDLFLPPSPESPPNWGDNLTRVNPFSLREDLRGGKIKLLDTPSKPVLPLVPPSPFPSTQLPLVTTPETLVQPGTPARRCRSLPSSPELPRRMETALPGPGPPAVGPSAEEKMECEGSSPEPEPPGPAPQLPLAVATDNFISTCSSASQPWSPRSGPVLNNNPPAVVVNSPQGWAGEPWNRAQHSLPRAAALERTEPSPPPSAPREPDEGLPCPGCCLGPFSFGFLSMCPRPTPAVARYRNLNCEAGSLLCHRGHHAKPPTPSLQLPGARS

SEQ ID NO: 4275 - protein, 803 aa, Homo sapiens
MDFPQHSQHVLEQLNQQRQLGLLCDCTFVVDGVHFKAHKAVLAACSEYFKMLFVDQKDVVHLDISNAAGLGQMLEFMYTAKLSLSPENVDDVLAVATFLQMQDIITACHALKSLAEPATSPGGNAEALATEGGDKRAKEEKVATSTLSRLEQAGRSTPIGPSRDLKEERGGQAQSAASGAEQTEKADAPREPPPVELKPDPTSGMAAAEAEAALSESSEQEMEVEPARKGEEEQKEQEEQEEEGAGPAEVKEEGSQLENGEAPEENENEESAGTDSGQELGSEARGLRSGTYGDRTESKAYGSVIHKCEDCGKEFTHTGNFKRHIRIHTGEKPFSCRECSKAFSDPAACKAHEKTHSPLKPYGCEECGKSYRLISLLNLHKKRHSGEARYRCEDCGKLFTTSGNLKRHQLVHSGEKPYQCDYCGRSFSDPTSKMRHLETHDTDKEHKCPHCDKKFNQVGNLKAHLKIHIADGPLKCRECGKQFTTSGNLKRHLRIHSGEKPYVCIHCQRQFADPGALQRHVRIHTGEKPCQCVMCGKAFTQASSLIAHVRQHTGEKPYVCERCGKRFVQSSQLANHIRHHDNIRPHKCSVCSKAFVNVGDLSKHIIIHTGEKPYLCDKCGRGFNRVDNLRSHVKTVHQGKAGIKILEPEEGSEVSVVTVDDMVTLATEALAATAVTQLTVVPVGAAVTADETEVLKAEISKAVKQVQEEDPNTHILYACDSCGDKFLDANSLAQHVRIHTAQALVMFQTDADFYQQYGPGGTWPAGQVLQAGELVFRPRDGAEGQPALAETSPTAPECPPPAE

SEQ ID NO: 4276 - protein, 571 aa, Homo sapiens
MTRAGDHNRQRGCCGSLADYLTSAKFLLYLGHSLSTWGDRMWHFAVSVFLVELYGNSLLLTAVYGLVVAGSVLVLGAIIGDWVDKNARLKVAQTSLVVQNVSVILCGIILMMVFLHKHELLTMYHGWVLTSCYILIITIANIANLASTATAITIQRDWIVVVAGEDRSKLANMNATIRRIDQLTNILAPMAVGQIMTFGSPVIGCGFISGWNLVSMCVEYVLLWKVYQKTPALAVKAGLKEEETELKQLNLHKDTEPKPLEGTHLMGVKDSNIHELEHEQEPTCASQMAEPFRTFRDGWVSYYNQPVFLAGMGLAFLYMTVLGFDCITTGYAYTQGLSGSILSILMGASAITGIMGTVAFTWLRRKCGLVRTGLISGLAQLSCLILCVISVFMPGSPLDLSVSPFEDIRSRFIQGESITPTKIPEITTEIYMSNGSNSANIVPETSPESVPIISVSLLFAGVIAARIGLWSFDLTVTQLLQENVIESERGIINGVQNSMNYLLDLLHFIMVILAPNPEAFGLLVLISVSFVAMGHIMYFRFAQNTLGNKLFACGPDAKEVRKENQANTSVV

SEQ ID NO: 4277 - protein, 1314 aa, Homo sapiens
MALRPGAGSGGGGAAGAGAGSAGGGGFMFPVAGGIRPPQAGLMPMQQQGFPMVSVMQPNMQGIMGMNYSSQMSQGPIAMQAGIPMGPMPAAGMPYLGQAPFLGMRPPGPQYTPDMQKQFAEEQQKRFEQQQKLLEEERKRRQFEEQKQKLRLLSSVKPKTGEKSRDDALEAIKGNLDGFSRDAKMHPTPASHPKKPGPSLEEKFLVSCDISTSGQEQIKLNTSEVGHKALGPGSSKKYPSLMASNGVAVDGCVSGTTTAEAENTSDQNLSIEESGVGVFPSQDPAQPRMPPWIYNESLVPDAYKKILETTMTPTGIDTAKLYPILMSSGLPRETLGQIWALANRTTPGKLTKEELYTVLAMIAVTQRGVPAMSPDALNQFPAAPIPTLSGFSMTLPTPVSQPTVIPSGPAGSMPLSLGQPVMGINLVGPVGGAAAQASSGFIPTYPANQVVKPEEDDFQDFQDASKSGSLDDSFSDFQELPASSKTSNSQHGNSAPSLLMPLPGTKALPSMDKYAVFKGIAADKSSENTVPPGDPGDKYSAFRELEQTAENKPLGESFAEFRSAGTDDGFTDFKTADSVSPLEPPTKDKTFPPSFPSGTIQQKQQTQVKNPLNLADLDMFSSVNCSSEKPLSFSAVFSTSKSVSTPQSTGSAATMTALAATKTSSLADDFGEFSLFGEYSGLAPVGEQDDFADFMAFSNSSISSEQKPDDKYDALKEEASPVPLTSNVGSTVKGGQNSTAASTKYDVFRQLSLEGSGLGVEDLKDNTPSGKSDDDFADFHSSKFSSINSDKSLGEKAVAFRHTKEDSASVKSLDLPSIGGSSVGKEDSEDALSVQFDMKLADVGGDLKHVMSDSSLDLPTVSGQHPPAADIEDLKYAAFGSYSSNFAVSTLTSYDWSDRDDATQGRKLSPFVLSAGSGSPSATSILQKKETSFGSSENITMTSLSKVTTFVSEDALPETTFPALASFKDTIPQTSEQKEYENRDYKDFTKQDLPTAERSQEATCPSPASSGASQETPNECSDDFGEFQSEKPKISKFDFLVATSQSKMKSSEEMIKSELATFDLSVQGSHKRSLSLGDKEISRSSPSPALEQPFRDRSNTLNEKPALPVIRDKYKDLTGEVEENERYAYEWQRCLGSALNVIKKANDTLNGISSSSVCTEVIQSAQGMEYLLGVVEVYRVTKRVELGIKATAVCSEKLQQLLKDIDKVWNNLIGFMSLATLTPDENSLDFSSCMLRPGIKNAQELACGVCLLNVDSRSRKEEKPAEEHPKKAFNSETDSFKLAYGGHQYHASCANFWINCVEPKPPGLVLPDLL

SEQ ID NO: 4278 - protein, 1302 aa, Homo sapiens
MALRPGAGSGGGGAAGAGAGSAGGGGFMFPVAGGIRPPQAGLMPMQQQGFPMVSVMQPNMQGIMGMNYSSQMSQGPIAMQAGIPMGPMPAAGMPYLGQAPFLGMRPPGPQYTPDMQKQFAEEQQKRFEQQQKLLEEERKRRQFEEQKQKLRLLSSVKPKTGEKSRDDALEAIKGNLDGFSRDAKMHPTPASHPKKPGPSLEEKFLVSCDISTSGQEQIKLNTSEVGHKALGPGSSKKYPSLMASNGVAVDGCVSGTTTAEAENTSDQNLSIEESGVGVFPSQDPAQPRMPPWIYNESLVPDAYKKILETTMTPTGIDTAKLYPILMSSGLPRETLGQIWALANRTTPGKLTKEELYTVLAMIAVTQRGVPAMSPDALNQFPAAPIPTLSGFSMTLPTPVSQPTVIPSGPAGSMPLSLGQPVMGINLVGPVGGAAAQASSGFIPTYPANQVVKPEEDDFQDFQDASKSGSLDDSFSDFQELPASSKTSNSQHGNSAPSLLMPLPGTKALPSMDKYAVFKGIAADKSSENTVPPGDPGDKYSAFRELEQTAENKPLGESFAEFRSAGTDDGFTDFKTADSVSPLEPPTKDKTFPPSFPSGTIQQKQQTQVKNPLNLADLDMFSSVNCSSEKPLSFSAVFSTSKSVSTPQSTGSAATMTALAATKTSSLADDFGEFSLFGEYSGLAPVGEQDDFADFMAFSNSSISSEQKPDDKYDALKEEASPVPLTSNVGSTVKGGQNSTAASTKYDVFRQLSLEGSGLGVEDLKDNTPSGKSDDDFADFHSSKFSSINSDKSLGEKAVAFRHTKEDSASVKSLDLPSIGGSSVGKEDSEDALSVQFDMKLADVGGDLKHVMSDSSLDLPTVSGQHPPAADIEDLKYAAFGSYSSNFAVSTLTSYDWSDRDDATQGRKLSPFVLSAGSGSPSATSILQKKETSFGSSENITMTSLSKVTTFVSEDALPETTFPALASFKDTIPQTSEQKEYENRDYKDFTKQDLPTAERSQEATCPSPASSGASQETPNECSDDFGEFQSEKPKISKFDFLVATSQSKMKSSEEMIKSELATFDLSVQGSHKRSLSLGDKEISRSSPSPALEQPFRDRSNTLNEKPALPVIRDKYKDLTGEVEENERYAYEWQRCLGSALNVIKKANDTLNGISSSSVCTEVIQSAQGMEYLLGVVEVYRVTKRVELGIKATAVCSEKLQQLLKDIDKVWNNLIGFMSLATLTPDENSLDFSSCMLRPGIKNAQELACGVCLLNVDSRSRAFNSETDSFKLAYGGHQYHASCANFWINCVEPKPPGLVLPDLL

SEQ ID NO: 4279 - protein, 136 aa, Homo sapiens [sequence omitted]

SEQ ID NO: 4280 - protein, 723 aa, Homo sapiens
MPLFFRKRKPSEEARKRLEYQMCLAKEAGADDILDISKCELSEIPFGAFATCKVLQKKVLIVHTNHLTSLLPKSCSLLSLATIKVLDLHDNQLTALPDDLGQLTALQVLNVERNQLMQLPRSIGNLTQLQTLNVKDNKLKELPDTVGELRSLRTLNISGNEIQRLPQMLAHVRTLEMLSLDASAMVYPPREVCGAGTAAILQFLCKESGLEYYPPSQYLLPILEQDGIENSRDSPDGPTDRFSREELEWQNRFSDYEKRKEQKMLEKLEFERRLELGQREHTQLLQQSSSQKDEILQTVKEEQSRLEQGLSEHQRHLNAERQRLQEQLKQTEQNISSRIQKLLQDNQRQKKSSEILKSLENERIRMEQLMSITQEETESLRRRDVASAMQQMLTESCKNRLIQMAYESQRQNLVQQACSSMAEMDERFQQILSWQQMDQNKAISQILQESAMQKAAFEALQVKKDLMHRQIRSQIKLIETELLQLTQLELKRKSLDTESLQEMISEQRWALSSLLQQLLKEKQQREEELREILTELEAKSETRQENYWLIQYQRLLNQKPLSLKLQEEGMERQLVALLEELSAEHYLPIFAHHRLSLDLLSQMSPGDLAKVGVSEAGLQHEILRRVQELLDAARIQPELKPPMGEVVTPTAPQEPPESVRPSAPPAELEVQASECVVCLEREAQMIFLNCGHVCCCQQCCQPLRTCPLCRQDIAQRLRIYHSS

SEQ ID NO: 4281 - protein, 723 aa, Homo sapiens; identical to SEQ ID NO: 4280

SEQ ID NO: 4282 - protein, 723 aa, Homo sapiens; identical to SEQ ID NO: 4280

SEQ ID NO: 4283 - protein, 1178 aa, Homo sapiens
  VARIANT 220, 228, 259, 321, 329, 441, 447, 454, 468, 512, 584, 608,620, 631, 643, 770, 774, 778, 782, 808, 851, 853, 858, 887,896, 945, 994, 1010, 1097, 1105, 1129, 1147: Xaa = Any Amino Acid
MNDGDTVQEYSGRLERAPTGQIRDNLSSKRITKTYWDVGTTPTLVLWPIVLMVQGRVQQPQSEKGLETRGSDLHMRVCIMPPNKLLRPEVREMFEIFRNKIPSPIHRKANEEEQTPRVAAVSAPAPAALGASSTCAPHARFRPASRPQRRSRGIVPLPRGGAFSSPRSAFGLCCLAPAAVQREAERVQNGGSQAGALRAAGALRWSPGVRGTLSPPRKPXRMNRGPCXGLAAGLESSGSKGCGGVHAAGCARVTPGRCXGSRWRRSARRWAGTRCSSAPATSSRTCCSAICSSWAGAAIGTLSSMAEQTQFWMMLVKLSSXWGLVYMNXKTIFTTLSLSPSHTKFRHFLLARTMYFSFLNLEVKMQRKEKNTFLITCHPLCLLKKKKKKSRCPLMEAHQQKPCRFPWKKMMNWRRKKLLMMRISWARDHWIVLKLKNCQPXSGLGYXALKGTRXMLCYWKLESHSAQXILKRSHQCFLQSMYRTVQTWHLPHPSRQCWLQLQNHKCQLQNHXKQSHLHLKQRLKLALQDRRLNHLKPPSHQQWSEVLFDHQKLYPKKRNHLDVPRAPRVPRAPRSRLTFPKHLXDLKRPTGLLQLHSVKKSVKRLSRXNKYRHPLMLGNXTVRISRKRLWXQIKRLRPLSMLXLHEPVLSESQILSNFLLDRNLKETFLLALREFQARSVLLPKLPLPRTISQSQDPLLCLFPVEPQVPITHGQWMPPLMRLYVKQNWEHLQICPPTFLISLLRQCLLPLPNLSTRCMRRKPSCLPPWRXRRSXKRNXRLKXKRKKSREIGRGKKTRTRTKVRRRIKXKRKRKTRKLAGKQSIPGRNFLKRKRQIPTSLKSKNLKMLIPKXNXKMDLXGRRKRSIKIRRKIERKARKIKIRERKKKXKIKAEKIRXKPQHPHWCCPQKSWPCPCSALPQPPGSQPCCHLCCQCFRKNCLRRKRRXRRKKRKRTKRRRRKRRKKRRRRRRRKERKRRESERREKKRRRNTSMKKXKWNQSLWPRVQLSPDXLSESVLAKTRLSSARWSLPPRPSRRPRRTGRRPHRRPPRPPPAPCSSALRPCRCRCSPRPPRALPCCPPRVPPPPGPVPKPPCAAWXLRRSAPTXSEMSGAIRSGSALGVTSLTMGVPXLGVTTAMTGTTGPVLESXLHPQKRCSGSAPSVRTRRRTKSTRRGSIEPT

SEQ ID NO: 4284 - protein, 1161 aa, Homo sapiens
  VARIANT 203, 211, 242, 304, 312, 424, 430, 437, 451, 495, 567, 591,603, 614, 626, 753, 757, 761, 765, 791, 834, 836, 841, 870,879, 977, 993, 1080, 1088, 1112, 1130: Xaa = Any Amino Acid
MNDGDTVQEYSGRLERAPTGQIRDNLSSKRITKTYWDVGTTPTLVLWPIVLMVQGRVQQPQSEKGLETRGSDLHMRVCIMPPRKGPPPESWRSCSSNQEVSLRVSAPAPAALGASSTCAPHARFRPASRPQRRSRGIVPLPRGGAFSSPRSAFGLCCLAPAAVQREAERVQNGGSQAGALRAAGALRWSPGVRGTLSPPRKPXRMNRGPCXGLAAGLESSGSKGCGGVHAAGCARVTPGRCXGSRWRRSARRWAGTRCSSAPATSSRTCCSAICSSWAGAAIGTLSSMAEQTQFWMMLVKLSSXWGLVYMNXKTIFTTLSLSPSHTKFRHFLLARTMYFSFLNLEVKMQRKEKNTFLITCHPLCLLKKKKKKSRCPLMEAHQQKPCRFPWKKMMNWRRKKLLMMRISWARDHWIVLKLKNCQPXSGLGYXALKGTRXMLCYWKLESHSAQXILKRSHQCFLQSMYRTVQTWHLPHPSRQCWLQLQNHKCQLQNHXKQSHLHLKQRLKLALQDRRLNHLKPPSHQQWSEVLFDHQKLYPKKRNHLDVPRAPRVPRAPRSRLTFPKHLXDLKRPTGLLQLHSVKKSVKRLSRXNKYRHPLMLGNXTVRISRKRLWXQIKRLRPLSMLXLHEPVLSESQILSNFLLDRNLKETFLLALREFQARSVLLPKLPLPRTISQSQDPLLCLFPVEPQVPITHGQWMPPLMRLYVKQNWEHLQICPPTFLISLLRQCLLPLPNLSTRCMRRKPSCLPPWRXRRSXKRNXRLKXKRKKSREIGRGKKTRTRTKVRRRIKXKRKRKTRKLAGKQSIPGRNFLKRKRQIPTSLKSKNLKMLIPKXNXKMDLXGRRKRSIKIRRKIERKARKIKIRERKKKXKIKAEKIRXKPQHPHWCCPQKSWPCPCSALPQPPGSQPCCHLCCQCFRKNCLRRKRRRRRKKRKRTKRRRRKRRKKRRRRRRRKERKRRESERREKKRRRNTSMKKXKWNQSLWPRVQLSPDXLSESVLAKTRLSSARWSLPPRPSRRPRRTGRRPHRRPPRPPPAPCSSALRPCRCRCSPRPPRALPCCPPRVPPPPGPVPKPPCAAWXLRRSAPTXSEMSGAIRSGSALGVTSLTMGVPXLGVTTAMTGTTGPVLESXLHPQKRCSGSAPSVRTRRRTKSTRRGSIEPT

SEQ ID NO: 4285 - protein, 758 aa, Homo sapiens
MGRDTRSRSRSAGRRGRRRQSQSGSRSRSRSHGRRNRRRREDEGRRRRRRRSRERRSDSEEERWQRSGMRSRSPPRPKWHSRDGSSQSDSGEEQSRGQWARRRRRARSWSPSSSASSSASPGRSQSPRAAAAALSQQQSLQERLRLREERKQQEELMKAFETPEEKRARRLAKKEAKERKKREKMGWGEEYMGYTNTDNPFGDNNLLGTFIWNKALEKKGISHLEEKELKERNKRIQEDNRLELQKVKQLRLEREREKAMREQELEMLQREKEAEHFKTWEEQEDNFHLQQAKLRSKIRIRDGRAKPIDLLAKYISAEDDDLAVEMHEPYTFLNGLTVADMEDLLEDIQVYMELEQGKNADFWRDMTTITEDEISKLRKLEASGKGPGERREGVNASVSSDVQSVFKGKTYNQLQVIFQGIEGKIRAGGPNLDMGYWESLLQQLRAHMARARLRERHQDVLRQKLYKLKQEQGVESEPLFPILKQEPQSPSRSLEPEDAAPTPPGPSSEGGPAEAEVDGATPTEGDGDGDGEGEGEGEAVLMEEDLIQQSLDDYDAGRYSPRLLTAHELPLDAHVLEPDEDLQRLQLSRQQLQVTGDASESAEDIFFRRAKEGMGQDEAQFSVEMPLTGKAYLWADKYRPRKPRFFNRVHTGFEWNKYNQTHYDFDNPPPKIVQGYKFNIFYPDLIDKRSTPEYFLEACADNKDFAILRFHAGPPYEDIAFKIVNREWEYSHRHGFRCQFANGIFQLWFHFKRYRYRR

SEQ ID NO: 4286 - protein, 758 aa, Homo sapiens; identical to SEQ ID NO: 4285

SEQ ID NO: 4287 - protein, 758 aa, Homo sapiens; identical to SEQ ID NO: 4285

SEQ ID NO: 4288 - protein, 758 aa, Homo sapiens; identical to SEQ ID NO: 4285

SEQ ID NO: 4289 - protein, 405 aa, Homo sapiens
MHEPYTFLNGLTVADMEDLLEDIQVYMELEQGKNADFWRDMTTITEDEISKLRKLEASGKGPGHRGQNPRWWPQPGHGLLGEPPAAASCPHGTGPVSTRLRERHQDVLRQKLYKLKQEQGVESEPLFPILKQEPQSPSRSLEPEDAAPTPPGPSSEGGPAEAEVDGATPTEGDGDGDGEGEGEGEAVLMEEDLIQQSLDDYDAGRYSPRLLTAHELPLDAHVLEPDEDLQRLQLSRQQLQVTGDASESAEDIFFRRAKEGMGQDEAQFSVEMPLTGKAYLWADKYRPRKPRFFNRVHTGFEWNKYNQTHYDFDNPPPKIVQGYKFNIFYPDLIDKRSTPEYFLEACADNKDFAILRFHAGPPYEDIAFKIVNREWEYSHRHGFRCQFANGIFQLWFHFKRYRYRR

SEQ ID NO: 4290 - protein, 758 aa, Homo sapiens; identical to SEQ ID NO: 4285

SEQ ID NO: 4291 - protein, 758 aa, Homo sapiens; identical to SEQ ID NO: 4285

SEQ ID NO: 4292 - protein, 758 aa, Homo sapiens; identical to SEQ ID NO: 4285

SEQ ID NO: 4293 - protein, 758 aa, Homo sapiens; identical to SEQ ID NO: 4285

SEQ ID NO: 4294 - protein, 405 aa, Homo sapiens
MHEPYTFLNGLTVADMEDLLEDIQVYMELEQGKNADFWRDMTTITEDEISKLRKLEASGKGPGHRGQNPRWWPQPGHGLLGEPPAAASCPHGAGPVSTRLRERHQDVLRQKLYKLKQEQGVESEPLFPILKQEPQSPSRSLEPEDAAPTPPGPSSEGGPAEAEVDGATPTEGDGDGDGEGEGEGEAVLMEEDLIQQSLDDYDAGRYSPRLLTAHELPLDAHVLEPDEDLQRLQLSRQQLQVTGDASESAEDIFFRRAKEGMGQDEAQFSVEMPLTGKAYLWADKYRPRKPRFFNRVHTGFEWNKYNQTHYDFDNPPPKIVQGYKFNIFYPDLIDKRSTPEYFLEACADNKDFAILRFHAGPPYEDIAFKIVNREWEYSHRHGFRCQFANGIFQLWFHFKRYRYRR

SEQ ID NO: 4295 - protein, 475 aa, Homo sapiens
MAEGSVMFSDVSIDFSQEEWDCLDPVQRDLYRDVMLENYGNLVSMGLYTPKPQVISLLEQGKEPWMVGRELTRGLCSDLESMCETKLLSLKKEVYEIELCQREIMGLTKHGLEYSSFGDVLEYRSHLAKQLGYPNGHFSQEIFTPEYMPTFIQQTFLTLHQIINNEDRPYECKKCGKAFSQNSQFIQHQRIHIGEKSYECKECGKFFSCGSHVTRHLKIHTGEKPFECKECGKAFSCSSYLSQHQRIHTGKKPYECKECGKAFSYCSNLIDHQRIHTGEKPYECKVCGKAFTKSSQLFQHARIHTGEKPYECKECGKAFTQSSKLVQHQRIHTGEKPYECKECGKAFSSGSALTNHQRIHTGEKPYDCKECGKAFTQSSQLRQHQRIHAGEKPFECLECGKAFTQNSQLFQHQRIHTDEKPYECNECGKAFNKCSNLTRHLRIHTGEKPYNCKECGKAFSSGSDLIRHQGIHTNK

SEQ ID NO: 4296 - protein, 541 aa, Homo sapiens
MPRRKQSHPQPVKCEGVKVDTEDSLDEGPGALVLESDLLLGQDLEFEEEEEEEEGDGNSDQLMGFERDSEGDSLGARPGLPYGLSDDESGGGRALSAESEVEEPARGPGEARGERPGPACQLCGGPTGEGPCCGAGGPGGGPLLPPRLLYSCRLCTFVSHYSSHLKRHMQTHSGEKPFRCGRCPYASAQLVNLTRHTRTHTGEKPYRCPHCPFACSSLGNLRRHQRTHAGPPTPPCPTCGFRCCTPRPARPPSPTEQEGAVPRRPEDALLLPDLSLHVPPGGASFLPDCGQLRGEGEGLCGTGSEPLPELLFPWTCRGCGQELEEGEGSRLGAAMCGRCMRGEAGGGASGGPQGPSDKGFACSLCPFATHYPNHLARHMKTHSGEKPFRCARCPYASAHLDNLKRHQRVHTGEKPYKCPLCPYACGNLANLKRHGRIHSGDKPFRCSLCNYSCNQSMNLKRHMLRHTGEKPFRCATCAYTTGHWDNYKRHQKVHGHGGAGGPGLSASEGWAPPHSPPSVLSSRGPPALGTAGSRAVHTDSS

SEQ ID NO: 4297 - protein, 961 aa, Homo sapiens
MLLLLLLAPLFLRPPGAGGAQTPNATSEGCQIIHPPWEGGIRYRGLTRDQVKAINFLPVDYEIEYVCRGEREVVGPKVRKCLANGSWTDMDTPSRCVRICSKSYLTLENGKVFLTGGDLPALDGARVDFRCDPDFHLVGSSRSICSQGQWSTPKPHCQVNRTPHSERRAVYIGALFPMSGGWPGGQACQPAVEMALEDVNSRRDILPDYELKLIHHDSKCDPGQATKYLYELLYNDPIKIILMPGCSSVSTLVAEAARMWNLIVLSYGSSSPALSNRQRFPTFFRTHPSATLHNPTRVKLFEKWGWKKIATIQQTTEVFTSTLDDLEERVKEAGIEITFRQSFFSDPAVPVKNLKRQDARIIVGLFYETEARKVFCEVYKERLFGKKYVWFLIGWYADNWFKIYDPSINCTVDEMTEAVEGHITTEIVMLNPANTRSISNMTSQEFVEKLTKRLKRHPEETGGFQEAPLAYDAIWALALALNKTSGGGGRSGVRLEDFNYNNQTITDQIYRAMNSSSFEGVSGHVVFDASGSRMAWTLIEQLQGGSYKKIGYYDSTKDDLSWSKTDKWIGGSPPADQTLVIKTFRFLSQKLFISVSVLSSLGIVLAVVCLSFNIYNSHVRYIQNSQPNLNNLTAVGCSLALAAVFPLGLDGYHIGRNQFPFVCQARLWLLGLGFSLGYGSMFTKIWWVHTVFTKKEEKKEWRKTLEPWKLYATVGLLVGMDVLTLAIWQIVDPLHRTIETFAKEEPKEDIDVSILPQLEHCSSRKMNTWLGIFYGYKGLLLLLGIFLAYETKSVSTEKINDHRAVGMAIYNVAVLCLITAPVTMILSSQQDAAFAFASLAIVFSSYITLVVLFVPKMRRLITRGEWQSEAQDTMKTGSSTNNNEEEKSRLLEKENRELEKIIAEKEERVSELRHQLQSRQQLRSRRHPPTPPEPSGGLPRGPPEPPDRLSCDGSRVHLLYK

SEQ ID NO: 4298 - protein, 844 aa, Homo sapiens
MGPGAPFARVGWPLPLLVVMAAGVAPVWASHSPHLPRPHSRVPPHPSSERRAVYIGALFPMSGGWPGGQACQPAVEMALEDVNSRRDILPDYELKLIHHDSKCDPGQATKYLYELLYNDPIKIILMPGCSSVSTLVAEAARMWNLIVLSYGSSSPALSNRQRFPTFFRTHPSATLHNPTRVKLFEKWGWKKIATIQQTTEVFTSTLDDLEERVKEAGIEITFRQSFFSDPAVPVKNLKRQDARIIVGLFYETEARKVFCEVYKERLFGKKYVWFLIGWYADNWFKIYDPSINCTVDEMTEAVEGHITTEIVMLNPANTRSISNMTSQEFVEKLTKRLKRHPEETGGFQEAPLAYDAIWALALALNKTSGGGGRSGVRLEDFNYNNQTITDQIYRAMNSSSFEGVSGHVVFDASGSRMAWTLIEQLQGGSYKKIGYYDSTKDDLSWSKTDKWIGGSPPADQTLVIKTFRFLSQKLFISVSVLSSLGIVLAVVCLSFNIYNSHVRYIQNSQPNLNNLTAVGCSLALAAVFPLGLDGYHIGRNQFPFVCQARLWLLGLGFSLGYGSMFTKIWWVHTVFTKKEEKKEWRKTLEPWKLYATVGLLVGMDVLTLAIWQIVDPLHRTIETFAKEEPKEDIDVSILPQLEHCSSRKMNTWLGIFYGYKGLLLLLGIFLAYETKSVSTEKINDHRAVGMAIYNVAVLCLITAPVTMILSSQQDAAFAFASLAIVFSSYITLVVLFVPKMRRLITRGEWQSEAQDTMKTGSSTNNNEEEKSRLLEKENRELEKIIAEKEERVSELRHQLQSRQQLRSRRHPPTPPEPSGGLPRGPPEPPDRLSCDGSRVHLLYK

SEQ ID NO: 4299 - protein, 899 aa, Homo sapiens
MLLLLLLAPLFLRPPGAGGAHTPNATSEGCQIIHPPWEGGIRYRGLTRDQVKAINFLPVDYEIEYVCRGEREVVGPKVRKCLANGSWTDMDTPSRCVNRTPHSERRAVYIGALFPMSGGWPGGQACQPAVEMALEDVNSRRDILPDYELKLIHHDSKCDPGQATKYLYELLYNDPIKIILMPGCSSVSTLVAEAARMWNLIVLSYGSSSPALSNRQRFPTFFRTHPSATLHNPTRVKLFEKWGWKKIATIQQTTEVFTSTLDDLEERVKEAGIEITFRQSFFSDPAVPVKNLKRQDARIIVGLFYETEARKVFCEVYKERLFGKKYVWFLIGWYADNWFKIYDPSINCTVDEMTEAVEGHITTEIVMLNPANTRSISNMTSQEFVEKLTKRLKRHPEETGGFQEAPLAYDAIWALALALNKTSGGGGRSGVRLEDFNYNNQTITDQIYRAMNSSSFEGVSGHVVFDASGSRMAWTLIEQLQGGSYKKIGYYDSTKDDLSWSKTDKWIGGSPPADQTLVIKTFRFLSQKLFISVSVLSSLGIVLAVVCLSFNIYNSHVRYIQNSQPNLNNLTAVGCSLALAAVFPLGLDGYHIGRNQFPFVCQARLWLLGLGFSLGYGSMFTKIWWVHTVFTKKEEKKEWRKTLEPWKLYATVGLLVGMDVLTLAIWQIVDPLHRTIETFAKEEPKEDIDVSILPQLEHCSSRKMNTWLGIFYGYKGLLLLLGIFLAYETKSVSTEKINDHRAVGMAIYNVAVLCLITAPVTMILSSQQDAAFAFASLAIVFSSYITLVVLFVPKMRRLITRGEWQSEAQDTMKTGSSTNNNEEEKSRLLEKENRELEKIIAEKEERVSELRHQLQSRQQLRSRRHPPTPPEPSGGLPRGPPEPPDRLSCDGSRVHLLYK

SEQ ID NO: 4300 - protein, 578 aa, Homo sapiens
MLLLLLLAPLFLRPPGAGGAQTPNATSEGCQIIHPPWEGGIRYRGLTRDQVKAINFLPVDYEIEYVCRGEREVVGPKVRKCLANGSWTDMDTPSRCVRICSKSYLTLENGKVFLTGGDLPALDGARVDFRCDPDFHLVGSSRSICSQGQWSTPKPHCQVNRTPHSERRAVYIGALFPMSGGWPGGQACQPAVEMALEDVNSRRDILPDYELKLIHHDSKCDPGQATKYLYELLYNDPIKIILMPGCSSVSTLVAEAARMWNLIVLSYGSSSPALSNRQRFPTFFRTHPSATLHNPTRVKLFEKWGWKKIATIQQTTEVFTSTLDDLEERVKEAGIEITFRQSFFSDPAVPVKNLKRQDARIIVGLFYETEARKVFCEVYKERLFGKKYVWFLIGWYADNWFKIYDPSINCTVDEMTEAVEGHITTEIVMLNPANTRSISNMTSQEFVEKLTKRLKRHPEETGGFQEAPLAYDAIWALALALNKTSGGGSRSGVRLEDFNYNNQTITDQIYRAMNSSSFEGVSGHVVFDASGSRMAWTLIEQLQGGSYKKIGYYDSTKDDLSWSKTDKWIVISRTHSPT

SEQ ID NO: 4301 - protein, 869 aa, Homo sapiens
MDFPSSLRPALFLTGPLGLSDVPDLSFMCSWRDALTLPEAQPQNSENGALHVTKDLLWEPATPGPLPMLPPLIDPWDPGLTARDLLFRGGCRYRKRPRVVLDVTEQISRFLLDHGDVAFAPLGKLMLENFKLEGAGSRTKKKTVVSVKKLLQDLGGHQPWGCPWAYLSNRQRRFSILGGPILGTSVASHLAELLHEELVLRWEQLLLDEACTGGALAWVPGRTPQFGQLVYPAGGAQDRLHFQEVVLTPGDNPQFLGKPGRIQLQGPVRQVVTCTVQGESKALIYTFLPHWLTCYLTPGPFHPSSALLAVRSDYHCAVWKFGKQWQPTLLQAMQVEKGATGISLSPHLPGELAICSRSGAVCLWSPEDGLRQIYRDPETLVFRDSSSWRWADFTAHPRVLTVGDRTGVKMLDTQGPPGCGLLLFRLGAEASCQKGERVLLTQYLGHSSPKCLPPTLHLVCTQFSLYLVDERLPLVPMLKWNHGLPSPLLLARLLPPPRPSCVQPLLLGGQGGQLQLLHLAGEGASVPRLAGPPQSLPSRIDSLPAFPLLEPKIQWRLQERLKAPTIGLAAVVPPLPSAPTPGLVLFQLSAAGDVFYQQLRPQVDSSLRRDAGPPGDTQPDCHAPTASWTSQDTAGCSQWLKALLKVPLAPPVWTAPTFTHRQMLGSTELRREEEEGQRLGVLRKAMARGQLLLQRDLGSLPAAEPPPAPESGLEDKLSERLGEAWAGRGAAWWERQQGRTSEPGRQTRRPKRRTQLSSSFSLSGHVDPSEDTSSPHSPEWPPADALPLPPTTPPSQELTPDACAQGVPSEQRQMLRDYMAKLPPQRDTPGCATTPPHSQASSVRATRSQQHTPVLSSSQPLRKKPRMGF

SEQ ID NO: 4302 - protein, 775 aa, Homo sapiens
MLPPLIDPWDPGLTARDLLFRGGCRYRKRPRVVLDVTEQISRFLLDHGDVAFAPLGKLMLENFKLEGAGSRTKKKTVVSVKKLLQDLGGHQPWGCPWAYLSNRQRRFSILGGPILGTSVASHLAELLHEELVLRWEQLLLDEACTGGALAWVPGRTPQFGQLVYPAGGAQDRLHFQEVVLTPGDNPQFLGKPGRIQLQGPVRQVVTCTVQGETLLAVRSDYHCAVWKFGKQWQPTLLQAMQVEKGATGISLSPHLPGELAICSRSGAVCLWSPEDGLRQIYRDPETLVFRDSSSWRWADFTAHPRVLTVGDRTGVKMLDTQGPPGCGLLLFRLGAEASCQKGERVLLTQYLGHSSPKCLPPTLHLVCTQFSLYLVDERLPLVPMLKWNHGLPSPLLLARLLPPPRPSCVQPLLLGGQGGQLQLLHLAEGASVPRLAGPPQSLPSRIDSLPAFPLLEPKIQWRLQERLKAPTIGLAAVVPPLPSAPTPGLVLFQLSAAGDVFYQQLRPQVDSSLRRDAGPPGDTQPDCHAPTASWTSQDTAGCSQWLKALLKVPLAPPVWTAPTFTHRQMLGSTELRREEEEGQRLGVLRKAMARGQLLLQRDLGSLPAAEPPPAPESGLEDKLSERLGEAWAGRGAAWWERQQGRTSEPGRQTRRPKRRTQLSSSFSLSGHVDPSEDTSSPHSPEWPPADALPLPPTTPPSQELTPDACAQGVPSEQRQMLRDYMAKLPPQRDTPGCATTPPHSQASSVRATRSQQHTPVLSSSQPLRKKPRMGF

SEQ ID NO: 4303 - protein, 562 aa, Homo sapiens
MDDKGDPSNEEAPKAIKPTSKEFRKTWGFRRTTIAKREGAGDAEADPLEPPPPQQQLGLSLRRSGRQPKRTERVEQFLTIARRRGRRSMPVSLEDSGEPTSCPATDAETASEGSVESASETRSGPQSASTAVKERPASSEKVKGGDDHDDTSDSDSDGLTLKELQNRLRRKREQEPTERPLKGIQSRLRKKRREEGPAETVGSEASDTVEGVLPSKQEPENDQGVVSQAGKDDRESKLEGKAAQDIKDEEPGDLGRPKPECEGYDPNALYCICRQPHNNRFMICCDRCEEWFHGDCVGISEARGRLLERNGEDYICPNCTILQVQDETHSETADQQEAKWRPGDADGTDCTSIGTIEQKSSEDQGIKGRIEKAANPSGKKKLKIFQPVIEAPGASKCIGPGCCHVAQPDSVYCSNDCILKHAAATMKFLSSGKEQKPKPKEKMKMKPEKPSLPKCGAQAGIKISSVHKRPAPEKKETTVKKAVVVPARSEALGKEAACESSTPSWASDHNYNAVKPEKTAAPSPSLLYKCMYHLGVGLLDPSRSFWIAIPWACPGLGVAALC

SEQ ID NO: 4304 - protein, 2240 aa, Homo sapiens
MDDKGDPSNEEAPKAIKPTSKEFRKTWGFRRTTIAKREGAGDAEADPLEPPPPQQQLGLSLRRSGRQPKRTERVEQFLTIARRRGRRSMPVSLEDSGEPTSCPATDAETASEGSVESASETRSGPQSASTAVKERPASSEKVKGGDDHDDTSDSDSDGLTLKELQNRLRRKREQEPTERPLKGIQSRLRKKRREEGPAETVGSEASDTVEGVLPSKQEPENDQGVVSQAGKDDRESKLEGKAAQDIKDEEPGDLGRPKPECEGYDPNALYCICRQPHNNRFMICCDRCEEWFHGDCVGISEARGRLLERNGEDYICPNCTILQVQDETHSETADQQEAKWRPGDADGTDCTSIGTIEQKSSEDQGIKGRIEKAANPSGKKKLKIFQPVIEAPGASKCIGPGCCHVAQPDSVYCSNDCILKHAAATMKFLSSGKEQKPKPKEKMKMKPEKPSLPKCGAQAGIKISSVHKRPAPEKKETTVKKAVVVPARSEALGKEAACESSTPSWASDHNYNAVKPEKTAAPSPSLLYKSTKEDRRSEEKAAAMAASKKTAPPGSAVGKQPAPRNLVPKKSSFANVAAATPAIKKPPSGFKGTIPKRPWLSATPSSGASAARQAGPAPAAATAASKKFPGSAALVGAVRKPVVPSVPMASPAPGRLGAMSAAPSQPNSQIRQNIRRSLKEILWKRVNDSDDLIMTENEVGKIALHIEKEMFNLFQVTDNRYKSKYRSIMFNLKDPKNQGLFHRVLREEISLAKLVRLKPEELVSKELSTWKERPARSVMESRTKLHNESKKTAPRQEAIPDLEDSPPVSDSEEQQESARAVPEKSTAPLLDVFSSMLKDTTSQHRAHLFDLNCKICTGQVPSAEDEPAPKKQKLSASVKKEDLKSKHDSSAPDPAPDSADEVMPEAVPEVASEPGLESASHPNVDRTYFPGPPGDGHPEPSPLEDLSPCPASCGSGVVTTVTVSGRDPRTAPSSSCTAVASAASRPDSTHMVEARQDVPKPVLTSVMVPKSILAKPSSSPDPRYLSVPPSPNISTSESRSPPEGDTTLFLSRLSTIWKGFINMQSVAKFVTKAYPVSGCFDYLSEDLPDTIHIGGRIAPKTVWDYVGKLKSSVSKELCLIRFHPATEEEEVAYISLYSYFSSRGRFGVVANNNRHVKDLYLIPLSAQDPVPSKLLPFEGPGLESPRPNIILGLVICQKIKRPANSGELDKMDEKRTRLQPEEADVPAYPKVATVPQSEKKPSKYPLCSADAAVSTTPPGSPPPPPPLPEPPVLKVLSSLKPAAPSPATAATTAAAASTAASSTASSASKTASPLEHILQTLFGKKKSFDPSAREPPGSTAGLPQEPKTTAEDGVPAPPLLDPIVQQFGQFSKDKALEEEEDDRPYDPEEEYDPERAFDTQLVERGRRHEVERAPEAAAAEREEVAYDPEDETILEEAKVTVDDLPNRMCADVRRNSVERPAEPVAGAATPSLVEQQKMLEELNKQIEEQKRQLEEQEEALRQQRAAVGVSMAHFSVSDALMSPPPKSSLPKAELFQQEQQSADKPASLPPASQASNHRDPRQARRLAAETGEGEGEPLSRLSARGAQGALPERDASRGGLVGQAPMPVPEEKEPASSPWASGEKPPAGSEQDGWKAEPGEGTRPATVGDSSARPARRVLLPTPPCGALQPGFPLQHDGERDPFTCPGFASQDKALGSAQYEDPRNLHSAGRSSSPAGETEGDREPQARPGEGTAPLPPPGQKVGGSQPPFQGQREPGPHALGMSGLHGPNFPGPRGPAPPFPEENIASNDGPRGPPPARFGAQKGPIPSLFSGQHGPPPYGDSRGPSPSYLGGPRGVAPSQFEERKDPHGEKREFQDAPYNEVTGAPAQFEGTEQAPFLGSRGGAPFQFGGQRRPLLSQLKGPRGGPPPSQFGGQRGPPPGHFVGPRGPHPSQFETARGPHPNQFEGPRGQAPNFMPGPRGIQPQQFEDQRVHSPPRFTNQRAPAPLQFGGLRGSAPFSEKNEQTPSRFHFQGQAPQVMKPGPRPLLELPSHPPQHRKDRWEEAGPPSALSSSAPGQGPEADGQWASADFREGKGHEYRNQTFEGRQRERFDVGPKEKPLEEPDAQGRASEDRRRERERGRNWSRERDWDRPREWDRHRDKDSSRDWDRNRERSANRDREREADRGKEWDRSRERSRNRERERDRRRDRDRSRSRERDRDKARDRERGRDRKDRSKSKESARDPKPEASRASDAGTASQA

SEQ ID NO: 4305 - protein, 562 aa, Homo sapiens; identical to SEQ ID NO: 4303

SEQ ID NO: 4306 - protein, 1189 aa, Homo sapiens
MDDKGDPSNEEAPKAIKPTSKEFRKTWGFRRTTIAKREGAGDAEADPLEPPPPQQQLGLSLRRSGRQPKRTERVEQFLTIARRRGRRSMPVSLEDSGEPTSCPATDAETASEGSVESASETRSGPQSASTAVKERPASSEKVKGGDDHDDTSDSDSDGLTLKELQNRLRRKREQEPTERPLKGIQSRLRKKRREEGPAETVGSEASDTVEGVLPSKQEPENDQGVVSQAGKDDRESKLEGKAAQDIKDEEPGDLGRPKPECEGYDPNALYCICRQPHNNRFMICCDRCEEWFHGDCVGISEARGRLLERNGEDYICPNCTILQVQDETHSETADQQEAKWRPGDADGTDCTSIGTIEQKSSEDQGIKGRIEKAANPSGKKKLKIFQPVIEAPGASKCIGPGCCHVAQPDSVYCSNDCILKHAAATMKFLSSGKEQKPKPKEKMKMKPEKPSLPKCGAQAGIKISSVHKRPAPEKKETTVKKAVVVPARSEALGKEAACESSTPSWASDHNYNAVKPEKTAAPSPSLLYKSTKEDRRSEEKAAAMAASKKTAPPGSAVGKQPAPRNLVPKKSSFANVAAATPAIKKPPSGFKGTIPKRPWLSATPSSGASAARQAGPAPAAATAASKKFPGSAALVGAVRKPVVPSVPMASPAPGRLGAMSAAPSQPNSQIRQNIRRSLKEILWKRVNDSDDLIMTENEVGKIALHIEKEMFNLFQVTDNRYKSKYRSIMFNLKDPKNQGLFHRVLREEISLAKLVRLKPEELVSKELSTWKERPARSVMESRTKLHNESKKTAPRQEAIPDLEDSPPVSDSEEQQESARAVPEKSTAPLLDVFSSMLKDTTSQHRAHLFDLNCKICTGQVPSAEDEPAPKKQKLSASVKKEDLKSKHDSSAPDPAPDSADEVMPEAVPEVASEPGLESASHPNVDRTYFPGPPGDGHPEPSPLEDLSPCPASCGSGVVTTVTVSGRDPRTAPSSSCTAVASAASRPDSTHMVEARQDVPKPVLTSVMVPKSILAKPSSSPDPRYLSVPPSPNISTSESRSPPEGDTTLFLSRLSTIWKGFINMQSVAKFVTKAYPVSGCFDYLSEDLPDTIHIGGRIAPKTVWDYVGKLKSSVSKELCLIRFHPATEEEEVAYISLYSYFSSRGRFGVVANNNRHVKDLYLIPLSAQDPVPSKLLPFEGPGKRRLSGWR

SEQ ID NO: 4307 - protein, 331 aa, Homo sapiens
MEVTGDAGVPESGEIRTLKPCLLRRNYSREQHGVAASCLEDLRSKACDILAIDKSLTPVTLVLAEDGTIVDDDDYFLCLPSNTKFVALASNEKWAYNNSDGGTAWISQESFDVDETDSGAGLKWKNVARQLKEDLSSIILLSEEDLQMLVDAPCSDLAQELRQSCATVQRLQHTLQQVLDQREEVRQSKQLLQLYLQALEKEGSLLSKQEESKAAFGEEVDAVDTGISRETSSDVALASHILTALREKQAPELSLSSQDLELVTKEDPKALAVALNWDIKKTETVQEACERELALRLQQTQSLHSLRSISASKASPPGDLQNPKRARQDPT

SEQ ID NO: 4308 - protein, 268 aa, Homo sapiens
MEVTGDAGVPESGEIRTLKPCLLRRNYSREQHGVAASCLEDLRSKACDILAIDKSLTPVTLVLAEDGTIVDDDDYFLCLPSNTKFVALASNEKWAYNNSDGGTAWISQESFDVDETDSGAGLKWKNVARQLKEDLSSIILLSEEDLQMLVDAPCSDLAQELRQSCATVQRLQHTLQQVLDQREEVRQSKQLLQLYLQALEKEGSLLSKQEESKAAFGEEVDAVDTGISRETSSDVALASHILTALREKQAPELSLSSQDLEVGGNQGH

SEQ ID NO: 4309 - protein, 586 aa, Homo sapiens
MSATVVDAVNAAPLSGSKEMSLEEPKKMTREDWRKKKELEEQRKLGNAPAEVDEEGKDINPHIPQYISSVPWYIDPSKRPTLKHQRPQPEKQKQFSSSGEWYKRGVKENSIITKYRKGACENCGAMTHKKKDCFERPRRVGAKFTGTNIAPDEHVQPQLMFDYDGKRDRWNGYNPEEHMKIVEEYAKVDLAKRTLKAQKLQEELASGKLVEQANSPKHQWGEEEPNSQMEKDHNSEDEDEDKYADDIDMPGQNFDSKRRITVRNLRIREDIAKYLRNLDPNSAYYDPKTRAMRENPYANAGKNPDEVSYAGDNFVRYTGDTISMAQTQLFAWEAYDKGSEVHLQADPTKLELLYKSFKVKKEDFKEQQKESILEKYGGQEHLDAPPAELLLAQTEDYVEYSRHGTVIKGQERAVACSKYEEDVKIHNHTHIWGSYWKEGRWGYKCCHSFFKYSYCTGEAGKEIVNSEECIINEITGEESVKKPQTLMELHQEKLKEEKKKKKKKKKKHRKSSSDSDDEEKKHEKLKKALNAEEARLLHVKETMQIDERKRPYNSMYETREPTEEEMEAYRMKRQRPDDPMASFLGQ

SEQ ID NO: 4310 - protein, 471 aa, Homo sapiens
MSDFDEFERQLNENKQERDKENRHRKRSHSRSRSRDRKRRSRSRDRRNRDQRSASRDRRRRSKPLTRGAKEEHGGLIRSPRHEKKKKVRKYWDVPPPGFEHITPMQYKAMQAAGQIPATALLPTMTPDGLAVTPTPVPVVGSQMTRQARRLYVGNIPFGITEEAMMDFFNAQMRLGGLTQAPGNPVLAVQINQDKNFAFLEFRSVDETTQAMAFDGIIFQGQSLKIRRPHDYQPLPGMSENPSVYVPGVVSTVVPDSAHKLFIGGLPNYLNDDQVKELLTSFGPLKAFNLVKDSATGLSKGYAFCEYVDINVTDQAIAGLNGMQLGDKKLLVQRASVGAKNATLSTINQTPVTLQVPGLMSSQVQMGGHPTEVLCLMNMVLPEELLDDEEYEEIVEDVRDECSKYGLVKSIEIPRPVDGVEVPGCGKIFVEFTSVFDCQKAMQGLTGRKFANRVVVTKYCDPDSYHRRDFW

SEQ ID NO: 4311 - protein, 475 aa, Homo sapiens
MSDFDEFERQLNENKQERDKENRHRKRSHSRSRSRDRKRRSRSRDRRNRDQRSASRDRRRRSKPLTRGAKEEHGGLIRSPRHEKKKKVRKYWDVPPPGFEHITPMQYKAMQAAGQIPATALLPTMTPDGLAVTPTPVPVVGSQMTRQARRLYVGNIPFGITEEAMMDFFNAQMRLGGLTQAPGNPVLAVQINQDKNFAFLEFRSVDETTQAMAFDGIIFQGQSLKIRRPHDYQPLPGMSENPSVYVPGVVSTVVPDSAHKLFIGGLPNYLNDDQVKELLTSFGPLKAFNLVKDSATGLSKGYAFCEYVDINVTDQAIAGLNGMQLGDKKLLVQRASVGAKNATLVSPPSTINQTPVTLQVPGLMSSQVQMGGHPTEVLCLMNMVLPEELLDDEEYEEIVEDVRDECSKYGLVKSIEIPRPVDGVEVPGCGKIFVEFTSVFDCQKAMQGLTGRKFANRVVVTKYCDPDSYHRRDFW

SEQ ID NO: 4312 - protein, 1316 aa, Homo sapiens
MTIVDKASESSDPSAYQNQPGSSEAVSPGDMDAGSASWGAVSSLNDVSNHTLSLGPVPGAVVYSSSSVPDKSKPSPQKDQALGDGIAPPQKVLFPSEKICLKWQQTHRVGAGLQNLGNTCFANAALQCLTYTPPLANYMLSHEHSKTCHAEGFCMMCTMQAHITQALSNPGDVIKPMFVINEMRRIARHFRFGNQEDAHEFLQYTVDAMQKACLNGSNKLDRHTQATTLVCQIFGGYLRSRVKCLNCKGVSDTFDPYLDITLEIKAAQSVNKALEQFVKPEQLDGENSYKCSKCKKMVPASKRFTIHRSSNVLTLSLKRFANFTGGKIAKDVKYPEYLDIRPYMSQPNGEPIVYVLYAVLVHTGFNCHAGHYFCYIKASNGLWYQMNDSIVSTSDIRSVLSQQAYVLFYIRSHDVKNGGELTHPTHSPGQSSPRPVISQRVVTNKQAAPGFIGPQLPSHMIKNPPHLNGTGPLKDTPSSSMSSPNGNSSVNRASPVNASASVQNWSVNRSSVIPEHPKKQKITISIHNKLPVRQCQSQPNLHSNSLENPTKPVPSSTITNSAVQSTSNASTMSVSSKVTKPIPRSESCSQPVMNGKSKLNSSVLVPYGAESSEDSDEESKGLGKENGIGTIVSSHSPGQDAEDEEATPHELQEPMTLNGANSADSDSDPKENGLAPDGASCQGQPALHSENPFAKANGLPGKLMPAPLLSLPEDKILETFRLSNKLKGSTDEMSAPGAERGPPEDRDAEPQPGSPAAESLEEPDAAAGLSSTKKAPPPRDPGTPATKEGAWEAMAVAPEEPPPSAGEDIVGDTAPPDLCDPGSLTGDASPLSQDAKGMIAEGPRDSALAEAPEGLSPAPPARSEEPCEQPLLVHPSGDHARDAQDPSQSLGAPEAAERPPAPVLDMAPAGHPEGDAEPSPGERVEDAAAPKAPGPSPAKEKIGSLRKVDRGHYRSRRERSSSGEPARESRSKTEGHRHRRRRTCPRERDRQDRHAPEHHPGHGDRLSPGERRSLGRCSHHHSRHRSGVELDWVRHHYTEGERGWGREKFYPDRPRWDRCRYYHDRYALYAARDWKPFHGGREHERAGLHERPHKDHNRGRRGCEPARERERHRPSSPRAGAPHALAPHPDRFSHDRTALVAGDNCNLSDRFHEHENGKSRKRRHDSVENSDSHVEKKARRSEQKDPLEEPKAKKHKKSKKKKKSKDKHRDRDSRHQQDSDLSAACSDADLHRHKKKKKKKKRHSRKSEDFVKDSELHLPRVTSLETVAQFRRAQGGFPLSGGPPLEGVGPFREKTKHLRMESRDDRCRLFEYGQGD

SEQ ID NO: 4313 - protein, 332 aa, Homo sapiens
MATLKDQLIYNLLKEEQTPQNKITVVGVGAVGMACAISILMKDLADELALVDVIEDKLKGEMMDLQHGSLFLRTPKIVSGKDYNVTANSKLVIITAGARQQEGESRLNLVQRNVNIFKFIIPNVVKYSPNCKLLIVSNPVDILTYVAWKISGFPKNRVIGSGCNLDSARFRYLMGERLGVHPLSCHGWVLGEHGDSSVPVWSGMNVAGVSLKTLHPDLGTDKDKEQWKEVHKQVVESAYEVIKLKGYTSWAIGLSVADLAESIMKNLRRVHPVSTMIKGLYGIKDDVFLSVPCILGQNGISDLVKVTLTSEEEARLKKSADTLWGIQKELQF

SEQ ID NO: 4314 - protein, 1682 aa, Homo sapiens
MHRAVDPPGARAAREAFALGGLSCAGAWSSCPPHPPPRSAWLPGGRCSASIGQPPLPAPLPPSHGSSSGHPSKPYYAPGAPTPRPLHGKLESLHGCVQALLREPAQPGLWEQLGQLYESEHDSEEATRCYHSALRYGGSFAELGPRIGRLQQAQLWNFHTGSCQHRAKVLPPLEQVWNLLHLEHKRNYGAKRGGPPVKRAAEPPVVQPVPPAALSGPSGEEGLSPGGKRRRGCNSEQTGLPPGLPLPPPPLPPPPPPPPPPPPPLPGLATSPPFQLTKPGLWSTLHGDAWGPERKGSAPPERQEQRHSLPHPYPYPAPAYTAHPPGHRLVPAAPPGPGPRPPGAESHGCLPATRPPGSDLRESRVQRSRMDSSVSPAATTACVPYAPSRPPGLPGTTTSSSSSSSSNTGLRGVEPNPGIPGADHYQTPALEVSHHGRLGPSAHSSRKPFLGAPAATPHLSLPPGPSSPPPPPCPRLLRPPPPPAWLKGPACRAAREDGEILEELFFGTEGPPRPAPPPLPHREGFLGPPASRFSVGTQDSHTPPTPPTPTTSSSNSNSGSHSSSPAGPVSFPPPPYLARSIDPLPRPPSPAQNPQDPPLVPLTLALPPAPPSSCHQNTSGSFRRPESPRPRVSFPKTPEVGPGPPPGPLSKAPQPVPPGVGELPARGPRLFDFPPTPLEDQFEEPAEFKILPDGLANIMKMLDESIRKEEEQQQHEAGVAPQPPLKEPFASLQSPFPTDTAPTTTAPAVAVTTTTTTTTTTTATQEEEKKPPPALPPPPPLAKFPPPSQPQPPPPPPPSPASLLKSLASVLEGQKYCYRGTGAAVSTRPGPLPTTQYSPGPPSGATALPPTSAAPSAQGSPQPSASSSSQFSTSGGPWARERRAGEEPVPGPMTPTQPPPPLSLPPARSESEVLEEISRACETLVERVGRSATDPADPVDTAEPADSGTERLLPPAQAKEEAGGVAAVSGSCKRRQKEHQKEHRRHRRACKDSVGRRPREGRAKAKAKVPKEKSRRVLGNLDLQSEEIQGREKSRPDLGGASKAKPPTAPAPPSAPAPSAQPTPPSASVPGKKAREEAPGPPGVSRADMLKLRSLSEGPPKELKIRLIKVESGDKETFIASEVEERRLRMADLTISHCAADVVRASRNAKVKGKFRESYLSPAQSVKPKINTEEKLPREKLNPPTPSIYLESKRDAFSPVLLQFCTDPRNPITVIRGLAGSLRLNLGLFSTKTLVEASGEHTVEVRTQVQQPSDENWDLTGTRQIWPCESSRSHTTIAKYAQYQASSFQESLQEEKESEDEESEEPDSTTGTPPSSAPDPKNHHIIKFGTNIDLSDAKRWKPQLQELLKLPAFMRVTSTGNMLSHVGHTILGMNTVQLYMKVPGSRTPGHQENNNFCSVNINIGPGDCEWFAVHEHYWETISAFCDRHGVDYLTGSWWPILDDLYASNIPVYRFVQRPGDLVWINAGTVHWVQATGWCNNIAWNVGPLTAYQYQLALERYEWNEVKNVKSIVPMIHVSWNVARTVKISDPDLFKMIKFCLLQSMKHCQVQRESLVRAGKKIAYQGRVKDEPAYYCNECDVEVFNILFVTSENGSRNTYLVHCEGCARRRSAGLQGVVVLEQYRTEELAQAYDAFTLVRARRARGQRRRALGQAAGTGFGSPAAPFPEPPPAFSPQAPASTSR

SEQ ID NO: 4315 - protein, 945 aa, Homo sapiens
MKMLDESIRKEEEQQQHEAGVAPQPPLKEPFASLQSPFPTDTAPTTTAPAVAVTTTTTTTTTTTATQEEEKKPPPALPPPPPLAKFPPPSQPQPPPPPPPSPASLLKSLASVLEGQKYCYRGTGAAVSTRPGPLPTTQYSPGPPSGATALPPTSAAPSAQGSPQPSASSSSQFSTSGGPWARERRAGEEPVPGPMTPTQPPPPLSLPPARSESEVLEEISRACETLVERVGRSATDPADPVDTAEPADSGTERLLPPAQAKEEAGGVAAVSGSCKRRQKEHQKEHRRHRRACKDSVGRRPREGRAKAKAKVPKEKSRRVLGNLDLQSEEIQGREKSRPDLGGASKAKPPTAPAPPSAPAPSAQPTPPSASVPGKKAREEAPGPPGVSRADMLKLRSLSEGPPKELKIRLIKVESGDKETFIASEVEERRLRMADLTISHCAADVVRASRNAKVKGKFRESYLSPAQSVKPKINTEEKLPREKLNPPTPSIYLESKRDAFSPVLLQFCTDPRNPITVIRGLAGSLRLNLGLFSTKTLVEASGEHTVEVRTQVQQPSDENWDLTGTRQIWPCESSRSHTTIAKYAQYQASSFQESLQEEKESEDEESEEPDSTTGTPPSSAPDPKNHHIIKFGTNIDLSDAKRWKPQLQELLKLPAFMRVTSTGNMLSHVGHTILGMNTVQLYMKVPGSRTPGHQENNNFCSVNINIGPGDCEWFAVHEHYWETISAFCDRHGVDYLTGSWWPILDDLYASNIPVYRFVQRPGDLVWINAGTVHWVQATGWCNNIAWNVGPLTAYQYQLALERYEWNEVKNVKSIVPMIHVSWNVARTVKISDPDLFKMIKFCLLQSMKHCQVQRESLVRAGKKIAYQGRVKDEPAYYCNECDVEVFNILFVTSENGSRNTYLVHCEGCARRRSAGLQGVVVLEQYRTEELAQAYDAFTLAPASTSR

SEQ ID NO: 4316 - protein, 1684 aa, Homo sapiens [sequence omitted]

SEQ ID NO: 4317 - protein, 945 aa, Homo sapiens; identical to SEQ ID NO: 4315

SEQ ID NO: 4318 - protein, 273 aa, Homo sapiens
MAAADGALPEAAALEQPAELPASVRASIERKRQRALMLRQARLAARPYSATAAAATGGMANVKAAPKIIDTGGGFILEEEEEEEQKIGKVVHQPGPVMEFDYVICEECGKEFMDSYLMNHFDLPTCDNCRDADDKHKLITKTEAKQEYLLKDCDLEKREPPLKFIVKKNPHHSQWGDMKLYLKLQIVKRSLEVWGSQEALEEAKEVRQENREKMKQKKFDKKVKELRRAVRSSVWKRETIVHQHEYGPEENLEDDMYRKTCTMCGHELTYEKM

SEQ ID NO: 4319 - protein, 646 aa, Homo sapiens
MSYTGFVQGSETTLQSTYSDTSAQPTCDYGYGTWNSGTNRGYEGYGYGYGYGQDNTTNYGYGMATSHSWEMPSSDTNANTSASGSASADSVLSRINQRLDMVPHLETDMMQGGVYGSGGERYDSYESCDSRAVLSERDLYRSGYDYSELDPEMEMAYEGQYDAYRDQFRMRGNDTFGPRAQGWARDARSGRPMASGYGRMWEDPMGARGQCMSGASRLPSLFSQNIIPEYGMFQGMRGGGAFPGGSRFGFGFGNGMKQMRRTWKTWTTADFRTKKKKRKQGGSPDEPDSKATRTDCSDNSDSDNDEGTEGEATEGLEGTEAVEKGSRVDGEDEEGKEDGREEGKEDPEKGALTTQDENGQTKRKLQAGKKSQDKQKKRQRDRMVERIQFVCSLCKYRTFYEDEMASHLDSKFHKEHFKYVGTKLPKQTADFLQEYVTNKTKKTEELRKTVEDLDGLIHQIYRDQDLTQEIAMEHFVKKVEAAHCAACDLFIPMQFGIIQKHLKTMDHNRNRRLMMEQSKKSSLMVARSILNNKLISKKLERYLKGENPFTDSPEEEKEQEEAEGGALDEGAQGEAAGISEGAEGVPAQPPVPPEPAPGAVSPPPPPPPEEEEEGAVPLLGGALQRQIRGIPGLDVEDDEEGGGGAP

SEQ ID NO: 4320 - protein, 238 aa, Homo sapiens
MDSNHQSNYKLSKTEKKFLRKQIKAKHTLLRHEGIETVSYATQSLVVANGGLGNGVSRNQLLPVLEKCGLVDALLMPPNKPYSFARYRTTEESKRAYVTLNGKEVVDDLGQKITLYLNFVEKVQWKELRPQALPPGLMVVEEIISSEEEKMLLESVDWTEDTDNQNSQKSLKHRRVKHFGYEFHYENNNVDKDKPLSGGLPDICESFLEKWLRKGYIKHKPDQMTINQYEPGQDCHGF

SEQ ID NO: 4321 - protein, 319 aa, Homo sapiens
MGWRRKRVPQRGRKAPPPQLHGNINNLYFPIRWRDRLHWDSPNPAAECQRHEVTLVSRKPGPGRITWDELAASGLPSCDAAVNLAGENILNPLRRWNETFQKEVLGSRLETTQLLAKAITKAPQPPKAWVLVTGVAYYQPSLTAEYDEDSPGGDFDFFSNLVTKWEAAARLPGDSTRQVVVRSGVVLGRGGGAMGHMLLPFRLGLGGPIGSGHQFFPWIHIGDLAGILTHALEANHVHGVLNGVAPSSATNAEFAQTLGAALGRRAFIPLPSAVVQAVFGRQRAIMLLEGQKVIPQRTLATGYQYSFPELGAALKEIVA

SEQ ID NO: 4322 - protein, 2254 aa, Homo sapiens
MFRRARLSVKPNVRPGVGARGSTASNPQRGRESPRPPEPATDSASKPAEPTDVPTVDFGGAEPQEKAPRSSTEKTGGDNDVEESSRSSSTVSQRRKRISSTSSLVKSSVSVPSESHPLSTINQEAPQPTATSTKEKQPCSDRYRIYKAQKLREMLKEELRKEKKQWKNKYAINESQRPPDRSKMTMRDFIYYLPDNNPMTSSLEQEKKTEKPSTPVQTREQEGKSTPNAEDNEMEEETDDGPLLVPRVKVAEDGSIILDEESLTVEVLRTKGPCVVEENDPIFERGSTTTYSSFRKNYYSKPWSNKETDMFFLAISMVGTDFSMIGQLFPHRARIEIKNKFKREEKTNGWRIDKAFQEKRPFDFDFFAHLLQKVLAEEEKRKQKSVKNHSLKEKKSTKPRKNVKVKKVACEGVNNDPDESMSSRISDTERSQKDAQTVEEESLTLSREDAEQVALEVDLNQKKRRRKKQDGANELGVNNLLENATVQAGPSKGEKHKNKCQAIRPELKEGECSKEQMLSCTQNIDGIVGFASTEKVEKRTDPILSLSNQQDATSVATESSESSTSDLPSFEVGIRALCEVNNAEGSCIEERNVDLKNNSLEIDQTENVKPMLRGRFQRPKPNLSRAGKKSVLSQGKTESESKNSHSKTSVEKNHVEKDKMNTLDILRMETTERENPEAETVSVLGEKNCLQEGSQLKALRPVQVRGRLQKPKPNAGKAAERKEILISQEEIGANVEKNENESCADRDTPQHMEDQSRKDFEEEDVILQPEKNDSFQNVQPDEPKVLNECLSVQENNKANKLNQVPILRTRFQKPKPNIGRGTGRREISSKEEVLEKILVSGEMAAALRETVRLDTSPKEMVPAEINTKEMQSDLKETGRRAISPREKILDVIDDTIEMETGLKAMGREICLREKTPEVIDATEEIDKDLEEAGRREISPQKNGPEEVKPLGEVETDLKATGNESSPREKTPEGTDATEEIDKNLEETGRRKISPRENGPEEVKPVDEMETDLNATGRESSPREKTPEVIDATEEIDLEETEREVSPQENGLEEVKPLGEMETDLKATGRDSFPRGKTPEVIDAIEEIEIDLEETEREISPQENGLEEVKPLGEMQTDLKATGREISPREKTPEVIDATEEIDKDLEETGRREISPEENGPEEVKPVDEMETDLKTTGREGSSREKTREVIDAAEVIETDLEETEREISPQENGPEEVKPVGKMETDLKEIREEISQREKVLAEFSAIREKEIDLKETGKRDIPIMEKVSGKMAVVEEMEADLKETGKENFRERGSEEICVTEEKVAELKQTGKTDISPRENELEETSTSRQTDTHLMQSGSNDFSAMPSLDIQNISSEVLSMMHTPVEEKRNSEKEVSSHFSHFKISSQTHESDKTEVQGIQSPDVPEQFSDINLSKSLPQEQKPLEIKPAPFVRSRFKRPKPNLARAALKRETTESEKYIYEKKSETKKMETIVMQENNEQTDTLPSQHDEASLMISREKDTLGHRNEEAVILPCTQTERNLSPSNSCEPKEESQSAPVQKNDSVVSVGTNNVNTFQQEMKESVIQTARQVRGRLQRPRPNIRKTGQRQIVDKGEAKGIIKEGRTILPKDETEKKVLTVSNSQIETEIEVPSSAVPEHRMYENQSQVVLVENLHVNKTNETIRHENKPYVPSSAQMTRRKFQKAKPNLGRAHSKKEEPVLEKVTTDQSKEGKPEDHLLQKGASNTQLLLKEKAELLTSLEVSARKDCVGSKESALAKIDAELEEVGPSRRVGEETVGDNSPSSVVEEQYLNKLTSCPQPLNETSYSKIALDGKTTISSTSEYERNRGERRSHKKFKPNVTRGRGSKRVRGKTSKKEPRASKAMLVTLRASQEEDDDADDFESDYEEESYHLAPEEVNKAPVFVPVGLRSPEPVSAQIEETMEELEITVNVPDVGCIAVVEHELPNTDVTTEEMKQEENLSVPFEMTTSEHIQDEPGTNDGSTEAAITLLTMGDLVLQSEISSEQGDVGVCILPHVHSKDKSHIPSSLDNVNHKIVHECQELSSPVITTSPASFEENKIVLEEQSSREEISLMEKVKENATPTRNTISKVTSNLRIRSRLAKPKPNLEKTLGTNRLDDYQEVSSLCVTKGAEMETQRETEKNASKATELENKNLGPVTTAENKDQSKLACVHGIKGTSISSEVNLTERNENQEESSQEVHMLSVAPVASSETGPCTLGLDRGLGENSVEEPQIKDSKGDSVLTLPVPEVKECTV

SEQ ID NO: 4323 - protein, 291 aa, Homo sapiens
MSQEGVELEKSVRRLREKFHGKVSSKKAGALMRKFGSDHTGVGRSIVYGVKQKDGQELSNDLDAQDPPEDMKQDRDIQAVATSLLPLTEANLRMFQRAQDDLIPAVDRQFACSSCDHVWWRRVPQRKEVSRCRKCRKRYEPVPADKMWGLAEFHCPKCRHNFRGWAQMGSPSPCYGCGFPVYPTRILPPRRDRDPDRRSTHTHSCSAADCYNRREPHVPGTSCAHPKSRKQNHLPKVLHPSNPHISSGPTVATCLSQGGLLEDLDNLILEDLKEEEEEEEEVEDEEGGPRE

SEQ ID NO: 4324 - protein, 782 aa, Homo sapiens
MEVRKLSISWQFLIVLVLILQILSALDFDPYRVLGVSRTASQADIKKAYKKLAREWHPDKNKDPGAEDKFIQISKAYEILSNEEKRSNYDQYGDAGENQGYQKQQQQREYRFRHFHENFYFDESFFHFPFNSERRDSIDEKYLLHFSHYVNEVVPDSFKKPYLIKITSDWCFSCIHIEPVWKEVIQELEELGVGIGVVHAGYERRLAHHLGAHSTPSILGIINGKISFFHNAVVRENLRQFVESLLPGNLVEKVTNKNYVRFLSGWQQENKPHVLLFDQTPIVPLLYKLTAFAYKDYLSFGYVYVGLRGTEEMTRRYNINIYAPTLLVFKEHINRPADVIQARGMKKQIIDDFITRNKYLLAARLTSQKLFHELCPVKRSHRQRKYCVVLLTAETTKLSKPFEAFLSFALANTQDTVRFVHVYSNRQQEFADTLLPDSEAFQGKSAVSILERRNTAGRVVYKTLEDPWIGSESDKFILLGYLDQLRKDPALLSSEAVLPDLTDELAPVFLLRWFYSASDYISDCWDSIFHNNWREMMPLLSLIFSALFILFGTVIVQAFSDSNDERESSPPEKEEAQEKTGKTEPSFTKENSSKIPKKGFVEVTELTDVTYTSNLVRLRPGHMNVVLILSNSTKTSLLQKFALEVYTFTGSSCLHFSFLSLDKHREWLEYLLEFAQDAAPIPNQYDKHFMERDYTGYVLALNGHKKYFCLFKPQKTVEEEEAIGSCSDVDSSLYLGESRGKPSCGLGSRPIKGKLSKLSLWMERLLEGSLQRFYIPSWPELD

SEQ ID NO: 4325 - protein, 74 aa, Homo sapiens
MDSEVQRDGRILDLIDDAWREDKLPYEDVAIPLNELPEPEQDNGGTTESVKEQEMKWTDLALQYLHENVPPIGN

SEQ ID NO: 4326 - protein, 785 aa, Homo sapiens
MSDQDHSMDEMTAVVKIEKGVGGNNGGNGNGGGAFSQARSSSTGSSSSTGGGGQESQPSPLALLAATCSRIESPNENSNNSQGPSQSGGTGELDLTATQLSQGANGWQIISSSSGATPTSKEQSGSSTNGSNGSESSKNRTVSGGQYVVAAAPNLQNQQVLTGLPGVMPNIQYQVIPQFQTVDGQQLQFAATGAQVQQDGSGQIQIIPGANQQIITNRGSGGNIIAAMPNLLQQAVPLQGLANNVLSGQTQYVTNVPVALNGNITLLPVNSVSAATLTPSSQAVTISSSGSQESGSQPVTSGTTISSASLVSSQASSSSFFTNANSYSTTTTTSNMGIMNFTTSGSSGTNSQGQTPQRVSGLQGSDALNIQQNQTSGGSLQAGQQKEGEQNQQTQQQQILIQPQLVQGGQALQALQAAPLSGQTFTTQAISQETLQNLQLQAVPNSGPIIIRTPTVGPNGQVSWQTLQLQNLQVQNPQAQTITLAPMQGVSLGQTSSSNTTLTPIASAASIPAGTVTVNAAQLSSMPGLQTINLSALGTSGIQVHPIQGLPLAIANAPGDHGAQLGLHGAGGDGIHDDTAGGEEGENSPDAQPQAGRRTRREACTCPYCKDSEGRGSGDPGKKKQHICHIQGCGKVYGKTSHLRAHLRWHTGERPFMCTWSYCGKRFTRSDELQRHKRTHTGEKKFACPECPKRFMRSDHLSKHIKTHQNKKGGPGVALSVGTLPLDSGAGSEGSGTATPSALITTNMVAMEAICPEGIARLANSGINVMQVADLQSINISGNGF

SEQ ID NO: 4327 - protein, 1134 aa, Homo sapiens
MTSLYGRHAEKTTDMPKPSAPKVHVQRSVSRDTIAIHFSASGEEEEEEEEEFREYFEEGLDDQSIVTGLEAKEDLYLEPQVGHDPAGPAASPVLADGLSVSQAPAILPVSKNTVKLLESPVPAAQVLSTVPLAVSPGSSSSGPLASSPSVSSLSEQKTSSSSPLSSPSKSPILSSSASTSTLSSAKPFMSLVKSLSTEVEPKESPHPARHRHLMKTLVKSLSTDTSRQESDTVSYKPPDSKLNLHLFKQFTQPRNTGGDSKTAPSSPLTSPSDTRSFFKVPEMEAKIEDTKRRLSEVIYEPFQLLSKIIGEESGSHRPKALSSSASELSNLSSLNGHLESNNNYSIKEEECDSEGDGYGSDSNIPRSDHPKSTGEPTREIELKSSQGSSLKDLGLKTSSLVLEKCSLSALVSKEDEEFCELYTEDFDLETEGESKVDKLSDIPLKPEVLAEDGVVLDSEDEVDSAVQHPELPVKTLGFFIMCVYVYLILPLPHYVSGLFLGIGLGFMTAVCVIWFFTPPSAHKYHKLHKNLRHWNTRSLDIKEPEILKGWMNEIYNYDPETYHATLTHSVFVRLEGGTLRLSKPNKNISRRASYNEPKPEVTYISQKIYDLSDSKIYLVPKTLARKRIWNKKYPICIELGQQDDFMSKAQTDKETSEEKPPAEGSEDPKKPPRPQEGTRSSQRDQILYLFGRTGREKEEWFRRFILASKLKSEIKKSSGVSGGKPAPVFLAPGLLPAHSRHNSPSGHLTHSRSSSKGSVEEIMSQPKQKELAGSVRQKMLLDYSVYMGRCVPQESRSPQRSPLQSAESSPTAGKKLPEVPPSEEEEQEAWVNALLGRIFWDFLGEKYWSDLVSKKIQMKLSKIKLPYFMNELTLTELDMGVAVPKILQAFKPYVDHQGLWIDLEMSYNGSFLMTLETKMNLTKLGKEPLVEALKVGEIGKEGCRPRAFCLADSDEESSSAGSSEEDDAPEPSGGDKQLLPGAEGYVGGHRTSKIMRFVDKITKSKYFQKATETEFIKKKIEEVSNTPLLLTVEVQECRGTLAVNIPPPPTDRVWYGFRKPPHVELKARPKLGEREVTLVHVTDWIEKKLEQEFQKVFVMPNMDDVYITIMHSAMDPRSTSCLLKDPPVEAADQP

SEQ ID NO: 4328 - protein, 475 aa, Homo sapiens
MPHRKKKPFIEKKKAVSFHLVHRSQRDPLAADESAPQRVLLPTQKIDNEERRAEQRKYGVFFDDDYDYLQHLKEPSGPSELIPSSTFSAHNRREEKEETLVIPSTGIKLPSSVFASEFEEDVGLLNKAAPVSGPRLDFDPDIVAALDDDFDFDDPDNLLEDDFILQANKATGEEEGMDIQKSENEDDSEWEDVDDEKGDSNDDYDSAGLLSDEDCMSVPGKTHRAIADHLFWSEETKSRFTEYSMTSSVMRRNEQLTLHDERFEKFYEQYDDDEIGALDNAELEGSIQVDSNRLQEVLNDYYKEKAENCVKLNTLEPLEDQDLPMNELDESEEEEMITVVLEEAKEKWDCESICSTYSNLYNHPQLIKYQPKPKQIRISSKTGIPLNVLPKKGLTAKQTERIQMINGSDLPKVSTQPRSKNESKEDKRARKQAIKEERKERRVEKKANKLAFKLEKRRQEKELLNLKKNVEGLKL

SEQ ID NO: 4329 - protein, 334 aa, Homo sapiens
MAASGSGMAQKTWELANNMQEAQSIDEIYKYDKKQQQEILAAKPWTKDHHYFKYCKISALALLKMVMHARSGGNLEVMGLMLGKVDGETMIIMDSFALPVEGTETRVNAQAAAYEYMAAYIENAKQVGRLENAIGWYHSHPGYGCWLSGIDVSTQMLNQQFQEPFVAVVIDPTRTISAGKVNLGAFRTYPKGYKPPDEGPSEYQTIPLNKIEDFGVHCKQYYALEVSYFKSSLDRKLLELLWNKYWVNTLSSSSLLTNADYTTGQVFDLSEKLEQSEAQLGRGSFMLGLETHDRKSEDKLAKATRDSCKTTIEAIHGLMSQVIKDKLFNQINIS

SEQ ID NO: 4330 - protein, 822 aa, Homo sapiens
MNGHISNHPSSFGMYPSQMNGYGSSPTFSQTDREHGSKTSAKALYEQRKNYARDSVSSVSDISQYRVEHLTTFVLDRKDAMITVDDGIRKLKLLDAKGKVWTQDMILQVDDRAVSLIDLESKNELENFPLNTIQHCQAVMHSCSYDSVLALVCKEPTQNKPDLHLFQCDEVKANLISEDIESAISDSKGGKQKRRPDALRMISNADPSIPPPPRAPAPAPPGTVTQVDVRSRVAAWSAWAADQGDFEKPRQYHEQEETPEMMAARIDRDVQILNHILDDIEFFITKLQKAAEAFSELSKRKKNKKGKRKGPGEGVLTLRAKPPPPDEFLDCFQKFKHGFNLLAKLKSHIQNPSAADLVHFLFTPLNMVVQATGGPELASSVLSPLLNKDTIDFLNYTVNGDERQLWMSLGGTWMKARAEWPKEQFIPPYVPRFRNGWEPPMLNFMGATMEQDLYQLAESVANVAEHQRKQEIKRLSTEHSSVSEYHPADGYAFSSNIYTRGSHLDQGEAAVAFKPTSNRHIDRNYEPLKTQPKKYAKSKYDFVARNNSELSVLKDDILEILDDRKQWWKVRNASGDSGFVPNNILDIVRPPESGLGRADPPYTHTIQKQRMEYGPRPADTPPAPSPPPTPAPVPVPLPPSTPAPVPVSKVPANITRQNSSSSDSGGSIVRDSQRHKQLPVDRRKSQMEEVQDELIHRLTIGRSAAQKKFHVPRQNVPVINITYDSTPEDVKTWLQSKGFNPVTVNSLGVLNGAQLFSLNKDELRTVCPEGARVYSQITVQKAALEDSSGSSELQEIMRRRQEKISAAASDSGVESFDEGSSH

SEQ ID NO: 4331 - protein, 266 aa, Homo sapiens
MPIWVVLLSRIIMKEKQSTKVYLSLIPIISGVLLATVTELSFDMWGLVSALAATLCFSLQNIFSKKVLRDSRIHHLRLLNILGCHAVFFMIPTWVLVDLSAFLVSSDLTYVYQWPWTLLLLAVSGFCNFAQNVIAFSILNLVSPLSYSVANATKRIMVITVSLIMLRNPVTSTNVLGMMTAILGVFLYNKTKYDANQQARKHLLPVTTADLSSKERHRSPLEKPHNGLLFPQHGDYQYGRNNILTDHFQYSRQSYPNSYSLNRYDV

SEQ ID NO: 4332 - protein, 334 aa, Homo sapiens
MERKISRIHLVSEPSITHFLQVSWEKTLESGFVITLTDGHSAWTGTVSESEISQEADDMAMEKGKYVGELRKALLSGAGPADVYTFNFSKESCYFFFEKNLKDVSFRLGSFNLEKVENPAEVIRELICYCLDTIAENQAKNEHLQKENERLLRDWNDVQGRFEKCVSAKEALETDLYKRFILVLNEKKTKIRSLHNKLLNAAQEREKDIKQEGETAICSEMTADRDPVYDESTDEESENQTDLSGLASAAVSKDDSIISSLDVTDIAPSRKRRQRMQRNLGTEPKMAPQENQLQEKEKPDSSLPETSKKEHISAENMSLETLRNSSPEDLFDEI

SEQ ID NO: 4333 - protein, 336 aa, Homo sapiens
MERKISRIHLVSEPSITHFLQVSWEKTLESGFVITLTDGHSAWTGTVSESEISQEADDMAMEKGKYVGELRKALLSGAGPADVYTFNFSKESCYFFFEKNLKDVSFRLGSFNLEKVENPAEVIRELICYCLDTIAENQAKNEHLQKENERLLRDWNDVQGRFEKCVSAKEALETDLYKRFILVLNEKKTKIRSLHNKLLNAAQEREKDIKQEGETAICSEMTADRDPVYDESTDEESENQTDLSGLASAAVSKDDSIISSLDVTDIAPSRKRRQRMQRNLGTEPKMAPQENQLQEKENSRPDSSLPETSKKEHISAENMSLETLRNSSPEDLFDEI

SEQ ID NO: 4334 - protein, 334 aa, Homo sapiens; identical to SEQ ID NO: 4332

SEQ ID NO: 4335 - protein, 216 aa, Homo sapiens
MGTRDDEYDYLFKVVLIGDSGVGKSNLLSRFTRNEFNLESKSTIGVEFATRSIQVDGKTIKAQIWDTAGQERYRAITSAYYRGAVGALLVYDIAKHLTYENVERWLKELRDHADSNIVIMLVGNKSDLRHLRAVPTDEARAFAEKNGLSFIETSALDSTNVEAAFQTILTEIYRIVSQKQMSDRRENDMSPSNNVVPIHVPPTTENKPKVQCCQNI

SEQ ID NO: 4336 - protein, 852 aa, Homo sapiens
MSSVSPIQIPSRLPLLLTHEGVLLPGSTMRTSVDSARNLQLVRSRLLKGTSLQSTILGVIPNTPDPASDAQDLPPLHRIGTAALAVQVVGSNWPKPHYTLLITGLCRFQIVQVLKEKPYPIAEVEQLDRLEEFPNTCKMREELGELSEQFYKYAVQLVEMLDMSVPAVAKLRRLLDSLPREALPDILTSIIRTSNKEKLQILDAVSLEERFKMTIPLLVRQIEGLKLLQKTRKPKQDDDKRVIAIRPIRRITHISGTLEDEDEDEDNDDIVMLEKKIRTSSMPEQAHKVCVKEIKRLKKMPQSMPEYALTRNYLELMVELPWNKSTTDRLDIRAARILLDNDHYAMEKLKKRVLEYLAVRQLKNNLKGPILCFVGPPGVGKTSVGRSVAKTLGREFHRIALGGVCDQSDIRGHRRTYVGSMPGRIINGLKTVGVNNPVFLLDEVDKLGKSLQGDPAAALLEVLDPEQNHNFTDHYLNVAFDLSQVLFIATANTTATIPAALLDRMEIIQVPGYTQEEKIEIAHRHLIPKQLEQHGLTPQQIQIPQVTTLDIITRYTREAGVRSLDRKLGAICRAVAVKVAEGQHKEAKLDRSDVTEREGCREHILEDEKPESISDTTDLALPPEMPILIDFHALKDILGPPMYEMEVSQRLSQPGVAIGLAWTPLGGEIMFVEASRMDGEGQLTLTGQLGDVMKESAHLAISWLRSNAKKYQLTNAFGSFDLLDNTDIHLHFPAGAVTKDGPSAGVTIVTCLASLFSGRLVRSDVAMTGEITLRGLVLPVGGIKDKVLAAHRAGLKQVIIPRRNEKDLEGIPGNVRQDLSFVTASCLDEVLNAAFDGGFTVKTRPGLLNSKL

SEQ ID NO: 4337 - protein, 878 aa, Homo sapiens
MATAPSYPAGLPGSPGPGSPPPPGGLELQSPPPLLPQIPAPGSGVSFHIQIGLTREFVLLPAASELAHVKQLACSIVDQKFPECGFYGLYDKILLFKHDPTSANLLQLVRSSGDIQEGDLVEVVLSASATFEDFQIRPHALTVHSYRAPAFCDHCGEMLFGLVRQGLKCDGCGLNYHKRCAFSIPNNCSGARKRRLSSTSLASGHSVRLGTSESLPCTAEELSRSTTELLPRRPPSSSSSSSASSYTGRPIELDKMLLSKVKVPHTFLIHSYTRPTVCQACKKLLKGLFRQGLQCKDCKFNCHKRCATRVPNDCLGEALINGDVPMEEATDFSEADKSALMDESEDSGVIPGSHSENALHASEEEEGEGGKAQSSLGYIPLMRVVQSVRHTTRKSSTTLREGWVVHYSNKDTLRKRHYWRLDCKCITLFQNNTTNRYYKEIPLSEILTVESAQNFSLVPPGTNPHCFEIVTANATYFVGEMPGGTPGGPSGQGAEAARGWETAIRQALMPVILQDAPSAPGHAPHRQASLSISVSNSQIQENVDIATVYQIFPDEVLGSGQFGVVYGGKHRKTGRDVAVKVIDKLRFPTKQESQLRNEVAILQSLRHPGIVNLECMFETPEKVFVVMEKLHGDMLEMILSSEKGRLPERLTKFLITQILVALRHLHFKNIVHCDLKPENVLLASADPFPQVKLCDFGFARIIGEKSFRRSVVGTPAYLAPEVLLNQGYNRSLDMWSVGVIMYVSLSGTFPFNEDEDINDQIQNAAFMYPASPWSHISAGAIDLINNLLQVKMRKRYSVDKSLSHPWLQEYQTWLDLRELEGKMGERYITHESDDARWEQFAAEHPLPGSGLPTDRDLGGACPPQDHDMQGLAERISVL

SEQ ID NO: 4338 - protein, 1980 aa, Homo sapiens
MNPTNPFSGQQPSAFSASSSNVGTLPSKPPFRFGQPSLFGQNSTLSGKSSGFSQVSSFPASSGVSHSSSVQTLGFTQTSSVGPFSGLEHTSTFVATSGPSSSSVLGNTGFSFKSPTSVGAFPSTSAFGQEAGEIVNSGFGKTEFSFKPLENAVFKPILGAESEPEKTQSQIASGFFTFSHPISSAPGGLAPFSFPQVTSSSATTSNFTFSKPVSSNNSLSAFTPALSNQNVEEEKRGPKSIFGSSNNSFSSFPVSSAVLGEPFQASKAGVRQGCEEAVSQVEPLPSLMKGLKRKEDQDRSPRRHGHEPAEDSDPLSRGDHPPDKRPVRLNRPRGGTLFGRTIQDVFKSNKEVGRLGNKEAKKETGFVESAESDHMAIPGGNQSVLAPSRIPGVNKEEETESREKKEDSLRGTPARQSNRSESTDSLGGLSPSEVTAIQCKNIPDYLNDRTILENHFGKIAKVQRIFTRRSKKLAVVHFFDHASAALARKKGKSLHKDMAIFWHRKKISPNKKPFSLKEKKPGDGEVSPSTEDAPFQHSPLGKAAGRTGASSLLNKSSPVKKPSLLKAHQFEGDSFDSASEGSEGLGPCVLSLSTLIGTVAETSKEKYRLLDQRDRIMRQARVKRTDLDKARTFVGTCLDMCPEKERYMRETRSQLSVFEVVPGTDQVDHAAAVKEYSRSSADQEEPLPHELRPLPVLSRTMDYLVTQIMDQKEGSLRDWYDFVWNRTRGIRKDITQQHLCDPLTVSLIEKCTRFHIHCAHFMCEEPMSSFDAKINNENMTKCLQSLKEMYQDLRNKGVFCASEAEFQGYNVLLSLNKGDILREVQQFHPAVRNSSEVKFAVQAFAALNSNNFVRFFKLVQSASYLNACLLHCYFSQIRKDALRALNFAYTVSTQRSTIFPLDGVVRMLLFRDCEEATDFLTCHGLTVSDGCVELNRSAFLEPEGLSKTRKSVFITRKLTVSVGEIVNGGPLPPVPRHTPVCSFNSQNKYIGESLAAELPVSTQRPGSDTVGGGRGEECGVEPDAPLSSLPQSLPAPAPSPVPLPPVLALTPSVAPSLFQLSVQPEPPPPEPVPMYSDEDLAQVVDELIQEALQRDCEEVGSAGAAYAAAALGVSNAAMEDLLTAATTGILRHIAAEEVSKERERREQERQRAEEERLKQERELVLSELSQGLAVELMERVMMEFVRETCSQELKNAVETDQRVRVARCCEDVCAHLVDLFLVEEIFQTAKETLQELQCFCKYLQRWREAVTARKKLRRQMRAFPAAPCCVDVSDRLRALAPSAECPIAEENLARGLLDLGHAGRLGISCTRLRRLRNKTAHQMKVQHFYQQLLSDVAWASLDLPSLVAEHLPGRQEHVFWKLVLVLPDVEEQSPESCGRILANWLKVKFMGDEGSVDDTSSDAGGIQTLSLFNSLSSKGDQMISVNVCIKVAHGALSDGAIDAVETQKDLLGASGLMLLLPPKMKSEDMAEEDVYWLSALLQLKQLLQAKPFQPALPLVVLVPSPGGDAVEKEVEDGLMLQDLVSAKLISDYTVTEIPDTINDLQGSTKVLQAVQWLVSHCPHSLDLCCQTLIQYVEDGIGHEFSGRFFHDRRERRLGGLASQEPGAIIELFNSVLQFLASVVSSEQLCDLSWPVTEFAEAGGSRLLPHLHWNAPEHLAWLKQAVLGFQLPQMDLPPLGAPWLPVCSMVVQYASQIPSSRQTQPVLQSQVENLLHRTYCRWKSKSPSPVHGAGPSVMEIPWDDLIALCINHKLRDWTPPRLPVTSEALSEDGQICVYFFKNDLKKYDVPLSWEQARLQTQKELQLREGRLAIKPFHPSANNFPIPLLHMHRNWKRSTECAQEGRIPSTEDLMRGASAEELLAQCLSSSLLLEKEENKRFEDQLQQWLSEDSGAFTDLTSLPLYLPQTLVSLSHTIEPVMKTSVTTSPQSDMMREQLQLSEATGTCLGERLKHLERLIRSSREEEVASELHLSALLDMVDI

SEQ ID NO: 4339 - protein, 821 aa, Homo sapiens
MPTVISASVAPRTAAEPRSPGPVPHPAQSKATEAGGGNPSGIYSAIISRNFPIIGVKEKTFEQLHKKCLEKKVLYVDPEFPPDETSLFYSQKFPIQFVWKRPPEICENPRFIIDGANRTDICQGELGDCWFLAAIACLTLNQHLLFRVIPHDQSFIENYAGIFHFQFWRYGEWVDVVIDDCLPTYNNQLVFTKSNHRNEFWSALLEKAYAKLHGSYEALKGGNTTEAMEDFTGGVAEFFEIRDAPSDMYKIMKKAIERGSLMGCSIDDGTNMTYGTSPSGLNMGELIARMVRNMDNSLLQDSDLDPRGSDERPTRTIIPVQYETRMACGLVRGHAYSVTGLDEVPFKGEKVKLVRLRNPWGQVEWNGSWSDRWKDWSFVDKDEKARLQHQVTEDGEFWMSYEDFIYHFTKLEICNLTADALQSDKLQTWTVSVNEGRWVRGCSAGGCRNFPDTFWTNPQYRLKLLEEDDDPDDSEVICSFLVALMQKNRRKDRKLGASLFTIGFAIYEVPKEMHGNKQHLQKDFFLYNASKARSKTYINMREVSQRFRLPPSEYVIVPSTYEPHQEGEFILRVFSEKRNLSEEVENTISVDRPVKKKKTKPIIFVSDRANSNKELGVDQESEEGKGKTSPDKQKQSPQPQPGSSDQESEEQQQFRNIFKQIAGDDMEICADELKKVLNTVVNKHKDLKTHGFTLESCRSMIALMDTDGSGKLNLQEFHHLWNKIKAWQKIFKHYDTDQSGTINSYEMRNAVNDAGFHLNNQLYDIITMRYADKHMNIDFDSFICCFVRLEGMFRAFHAFDKDGDGIIKLNVLEWLQLTMYA

SEQ ID NO: 4340 - protein, 815 aa, Homo sapiens
MPTVISASVAPRTAAEPRSPGPVPHPAQSKATEAGGGNPSGIYSAIISRNFPIIGVKEKTFEQLHKKCLEKKVLYVDPEFPPDETSLFYSQKFPIQFVWKRPPEICENPRFIIDGANRTDICQGELGDCWFLAAIACLTLNQHLLFRVIPHDQSFIENYAGIFHFQFWRYGEWVDVVIDDCLPTYNNQLVFTKSNHRNEFWSALLEKAYAKLHGSYEALKGGNTTEAMEDFTGGVAEFFEIRDAPSDMYKIMKKAIERGSLMGCSIDDGTNMTYGTSPSGLNMGELIARMVRNMDNSLLQDSDLDPRGSDERPTRTIIPVQYETRMACGLVRGHAYSVTGLDEVPFKGEKVKLVRLRNPWGQVEWNGSWSDRWKDWSFVDKDEKARLQHQVTEDGEFWMSYEDFIYHFTKLEICNLTADALQSDKLQTWTVSVNEGRWVRGCSAGGCRNFPDTFWTNPQYRLKLLEEDDDPDDSEVICSFLVALMQKNRRKDRKLGASLFTIGFAIYEVPKEMHGNKQHLQKDFFLYNASKARSKTYINMREVSQRFRLPPSEYVIVPSTYEPHQEGEFILRVFSEKRNLSEEVENTISVDRPVPIIFVSDRANSNKELGVDQESEEGKGKTSPDKQKQSPQPQPGSSDQESEEQQQFRNIFKQIAGDDMEICADELKKVLNTVVNKHKDLKTHGFTLESCRSMIALMDTDGSGKLNLQEFHHLWNKIKAWQKIFKHYDTDQSGTINSYEMRNAVNDAGFHLNNQLYDIITMRYADKHMNIDFDSFICCFVRLEGMFRAFHAFDKDGDGIIKLNVLEWLQLTMYA

SEQ ID NO: 4341 - protein, 729 aa, Homo sapiens
MPTVISASVAPRTAAEPRSPGPVPHPAQSKATEAGGGNPSGIYSAIISRNFPIIGVKEKTFEQLHKKCLEKKVLYVDPEFPPDETSLFYSQKFPIQFVWKRPPEICENPRFIIDGANRTDICQGELGDCWFLAAIACLTLNQHLLFRVIPHDQSFIENYAGIFHFQFWRYGEWVDVVIDDCLPTYNNQLVFTKSNHRNEFWSALLEKAYAKLHGSYEALKGGNTTEAMEDFTGGVAEFFEIRDAPSDMYKIMKKAIERGSLMGCSIDTIIPVQYETRMACGLVRGHAYSVTGLDEVPFKGEKVKLVRLRNPWGQVEWNGSWSDRWKDWSFVDKDEKARLQHQVTEDGEFWMSYEDFIYHFTKLEICNLTADALQSDKLQTWTVSVNEGRWVRGCSAGGCRNFPDTFWTNPQYRLKLLEEDDDPDDSEVICSFLVALMQKNRRKDRKLGASLFTIGFAIYEVPKEMHGNKQHLQKDFFLYNASKARSKTYINMREVSQRFRLPPSEYVIVPSTYEPHQEGEFILRVFSEKRNLSEEVENTISVDRPVPQPGSSDQESEEQQQFRNIFKQIAGDDMEICADELKKVLNTVVNKHKDLKTHGFTLESCRSMIALMDTDGSGKLNLQEFHHLWNKIKAWQKIFKHYDTDQSGTINSYEMRNAVNDAGFHLNNQLYDIITMRYADKHMNIDFDSFICCFVRLEGMFRAFHAFDKDGDGIIKLNVLEWLQLTMYA

SEQ ID NO: 4342 - protein, 309 aa, Homo sapiens
MHGNKQHLQKDFFLYNASKARSKTYINMREVSQRFRLPPSEYVIVPSTYEPHQEGEFILRVFSEKRNLSEEVENTISVDRPVKKKKTKPIIFVSDRANSNKELGVDQESEEGKGKTSPDKQKQSPQPQPGSSDQESEEQQQFRNIFKQIAGDDMEICADELKKVLNTVVNKHKDLKTHGFTLESCRSMIALMDTDGSGKLNLQEFHHLWNKIKAWQKIFKHYDTDQSGTINSYEMRNAVNDAGFHLNNQLYDIITMRYADKHMNIDFDSFICCFVRLEGMFRAFHAFDKDGDGIIKLNVLEWLQLTMYA

SEQ ID NO: 4343 - protein, 156 aa, Homo sapiens
MEICADELKKVLNTVVNKHKDLKTHGFTLESCRSMIALMDTDGSGKLNLQEFHHLWNKIKAWQKIFKHYDTDQSGTINSYEMRNAVNDAGFHLNNQLYDIITMRYADKHMNIDFDSFICCFVRLEGMFRAFHAFDKDGDGIIKLNVLEWLQLTMYA

SEQ ID NO: 4344 - protein, 156 aa, Homo sapiens; identical to SEQ ID NO: 4343

SEQ ID NO: 4345 - protein, 426 aa, Homo sapiens
MSWQISLKTQTTQQKNEICENPRFIIDGANRTDICQGELGDCWFLAAIACLTLNQHLLFRVIPHDQSFIENYAGIFHFQFWRYGEWVDVVIDDCLPTYNNQLVFTKSNHRNEFWSALLEKAYAKLHGSYEALKGGNTTEAMEDFTGGVAEFFEIRDAPSDMYKIMKKAIERGSLMGCSIDDGTNMTYGTSPSGLNMGELIARMVRNMDNSLLQDSDLDPRGSDERPTRTIIPVQYETRMACGLVRGHAYSVTGLDEVPFKGEKVKLVRLRNPWGQVEWNGSWSDRWKDWSFVDKDEKARLQHQVTEDGEFWMSYEDFIYHFTKLEICNLTADALQSDKLQTWTVSVNEGRWVRGCSAGGCRNFPDTFWTNPQYRLKLLEEDDDPDDSEVICSFLVALMQKNRRKDRKLGASLFTIGFAIYEVPKEV

SEQ ID NO: 4346 - protein, 728 aa, Homo sapiens
MSWQISLKTQTTQQKNEICENPRFIIDGANRTDICQGELGDCWFLAAIACLTLNQHLLFRVIPHDQSFIENYAGIFHFQFWRYGEWVDVVIDDCLPTYNNQLVFTKSNHRNEFWSALLEKAYAKLHGSYEALKGGNTTEAMEDFTGGVAEFFEIRDAPSDMYKIMKKAIERGSLMGCSIDDGTNMTYGTSPSGLNMGELIARMVRNMDNSLLQDSDLDPRGSDERPTRTIIPVQYETRMACGLVRGHAYSVTGLDEVPFKGEKVKLVRLRNPWGQVEWNGSWSDRWKDWSFVDKDEKARLQHQVTEDGEFWMSYEDFIYHFTKLEICNLTADALQSDKLQTWTVSVNEGRWVRGCSAGGCRNFPDTFWTNPQYRLKLLEEDDDPDDSEVICSFLVALMQKNRRKDRKLGASLFTIGFAIYEVPKEMHGNKQHLQKDFFLYNASKARSKTYINMREVSQRFRLPPSEYVIVPSTYEPHQEGEFILRVFSEKRNLSEEVENTISVDRPVPIIFVSDRANSNKELGVDQESEEGKGKTSPDKQKQSPQPQPGSSDQESEEQQQFRNIFKQIAGDDMEICADELKKVLNTVVNKHKDLKTHGFTLESCRSMIALMDTDGSGKLNLQEFHHLWNKIKAWQKIFKHYDTDQSGTINSYEMRNAVNDAGFHLNNQLYDIITMRYADKHMNIDFDSFICCFVRLEGMFRAFHAFDKDGDGIIKLNVLEWLQLTMYA

SEQ ID NO: 4347 - protein, 107 aa, Homo sapiens
MSWQISLKTQTTQQKNEICENPRFIIDGANRTDICQGELDGFQGSCLPGLPSNTNHLGGWFSEAQSSLKSEEELDSHCKGTGQGRFPTGVRKNNPVMITYCSVSIEA

SEQ ID NO: 4348 - protein, 105 aa, Homo sapiens
MICWRHPSAPCGRGEWQVPRSQLPLARVEFPVALGLGVAVGAEAAAIMVNLLQIVRDHWVHVLVPMGFVIGCYLDRKSDERLTAFRNKSMLFKRELQPSEEVTWK

SEQ ID NO: 4349 - protein, 261 aa, Homo sapiens
MIETYNQTSPRSAATGLPISMKIFMYLLTVFLITQMIGSALFAVYLHRRLDKIEDERNLHEDFVFMKTIQRCNTGERSLSLLNCEEIKSQFEGFVKDIMLNKEETKKENSFEMQKGDQNPQIAAHVISEASSKTTSVLQWAEKGYYTMSNNLVTLENGKQLTVKRQGLYYIYAQVTFCSNREASSQAPFIASLCLKSPGRFERILLRAANTHSSAKPCGQQSIHLGGVFELQPGASVFVNVTDPSQVSHGTGFTSFGLLKL

SEQ ID NO: 4350 - protein, 127 aa, Homo sapiens
MKDPSRSSTSPSIINEDVIINGHSHEDDNPFAEYMWMENEEEFNRQIEEELWEEEFIERCFQEMLEEEEEHEWFIPARDLPQTMDQIQDQFNDLVISDGSSLEDLVVKSNLNPNAKEFVPGVKYGNI

SEQ ID NO: 4351 - protein, 127 aa, Homo sapiens; identical to SEQ ID NO: 4350

SEQ ID NO: 4352 - protein, 584 aa, Homo sapiens
MLSRLRVVSTTCTLACRHLHIKEKGKPLMLNPRTNKGMAFTLQERQMLGLQGLLPPKIETQDIQALRFHRNLKKMTSPLEKYIYIMGIQERNEKLFYRILQDDIESLMPIVYTPTVGLACSQYGHIFRRPKGLFISISDRGHVRSIVDNWPENHVKAVVVTDGERILGLGDLGVYGMGIPVGKLCLYTACAGIRPDRCLPVCIDVGTDNIALLKDPFYMGLYQKRDRTQQYDDLIDEFMKAITDRYGRNTLIQFEDFGNHNAFRFLRKYREKYCTFNDDIQGTAAVALAGLLAAQKVISKPISEHKILFLGAGEAALGIANLIVMSMVENGLSEQEAQKKIWMFDKYGLLVKGRKAKIDSYQEPFTHSAPESIPDTFEDAVNILKPSTIIGVAGAGRLFTPDVIRAMASINERPVIFALSNPTAQAECTAEEAYTLTEGRCLFASGSPFGPVKLTDGRVFTPGQGNNVYIFPGVALAVILCNTRHISDSVFLEAAKALTSQLTDEELAQGRLYPPLANIQEVSINIAIKVTEYLYANKMAFRYPEPEDKAKYVKERTWRSEYDSLLPDVYEWPESASSPPVITE

SEQ ID NO: 4353 - protein, 696 aa, Homo sapiens
MKFAEHLSAHITPEWRKQYIQYEAFKDMLYSAQDQAPSVEVTDEDTVKRYFAKFEEKFFQTCEKELAKINTFYSEKLAEAQRRFATLQNELQSSLDAQKESTGVTTLRQRRKPVFHLSHEERVQHRNIKDLKLAFSEFYLSLILLQNYQNLNFTGFRKILKKHDKILETSRGADWRVAHVEVAPFYTCKKINQLISETEAVVTNELEDGDRQKAMKRLRVPPLGAAQPAPAWTTFRVGLFCGIFIVLNITLVLAAVFKLETDRSIWPLIRIYRGGFLLIEFLFLLGINTYGWRQAGVNHVLIFELNPRSNLSHQHLFEIAGFLGILWCLSLLACFFAPISVIPTYVYPLALYGFMVFFLINPTKTFYYKSRFWLLKLLFRVFTAPFHKVGFADFWLADQLNSLSVILMDLEYMICFYSLELKWDESKGLLPNNSEESGICHKYTYGVRAIVQCIPAWLRFIQCLRRYRDTKRAFPHLVNAGKYSTTFFMVTFAALYSTHKERGHSDTMVFFYLWIVFYIISSCYTLIWDLKMDWGLFDKNAGENTFLREEIVYPQKAYYYCAIIEDVILRFAWTIQISITSTTLLPHSGDIIATVFAPLEVFRRFVWNFFRLENEHLNNCGEFRAVRDISVAPLNADDQTLLEQMMDQDDGVRNRQKNRSWKYNQSISLRRPRLASQSKARDTKVLIEDTDDEANT

SEQ ID NO: 4354 - protein, 253 aa, Homo sapiens
MSWIPFKIGQPKKQIVPKTVERDFEREYGKLQQLEEQTRRLQKDMKKSTDADLAMSKSAVKISLDLLSNPLCEQDQDLLNMVTALDTAMKRMDAFNQEKVNQIQKTVIEPLKKFGSVFPSLNMAVKRREQALQDYRRLQAKVEKYEEKEKTGPVLAKLHQAREELRPVREDFEAKNRQLLEEMPRFYGSRLDYFQPSFESLIRAQVVYYSEMHKIFGDLSHQLDQPGHSDEQRERENEAKLSELRALSIVADD

SEQ ID NO: 4355 - protein, 391 aa, Homo sapiens
MKCLVTGGNVKVLGKAVHSLSRIGDELYLEPLEDGLSLRTVNSSRSAYACFLFAPLFFQQYQAATPGQDLLRCKILMKSFLSVFRSLAMLEKTVEKCCISLNGRSSRLVVQLHCKFGVRKTHNLSFQDCESLQAVFDPASCPHMLRAPARVLGEAVLPFSPALAEVTLGIGRGRRVILRSYHEEEADSTAKAMVTEMCLGEEDFQQLQAQEGVAITFCLKEFRGLLSFAESANLNLSIHFDAPGRPAIFTIKDSLLDGHFVLATLSDTDSHSQDLGSPERHQPVPQLQAHSTPHPDDFANDDIDSYMIAMETTIGNEGSRVLPSISLSPGPQPPKSPGPHSEEEDEAEPSTVPGTPPPKKFRSLFFGSILAPVRSPQGPSPVLAEDSEGEG

SEQ ID NO: 4356 - protein, 576 aa, Homo sapiens
MGSILSRRIAGVEDIDIQANSAYRYPPKSGNYFASHFFMGGEKFDTPHPEGYLFGENMDLNFLGSRPVQFPYVTPAPHEPVKTLRSLVNIRKDSLRLVRYKDDADSPTEDGDKPRVLYSLEFTFDADARVAITIYCQASEEFLNGRAVYSPKSPSLQSETVHYKRGVSQQFSLPSFKIDFSEWKDDELNFDLDRGVFPVVIQAVVDEGDVVEVTGHAHVLLAAFEKHMDGSFSVKPLKQKQIVDRVSYLLQEIYGIENKNNQETKPSDDENSDNSNECVVCLSDLRDTLILPCRHLCLCTSCADTLRYQANNCPICRLPFRALLQIRAVRKKPGALSPVSFSPVLAQSLEHDEHSCPFKKSKPHPASLASKKPKRETNSDSVPPGYEPISLLEALNGLRAVSPAIPSAPLYEEITYSGISDGLSQASCPLAAIDHILDSSRQKGRPQSKAPDSTLRSPSSPIHEEDEEKLSEDVDAPPPLGGAELALRESSSPESFITEEVDESSSPQQGTRAASIENVLQDSSPEHCGRGPPADIYLPGRPTSMETAHGLATTSPTWPPLGGPSPDPSAAELTPL

SEQ ID NO: 4357 - protein, 2436 aa, Homo sapiens
MGFLHQLQLLLWKNVTLKRRSPWVLAFEIFIPLVLFFILLGLRQKKPTISVKEVSFYTAAPLTSAGILPVMQSLCPDGQRDEFGFLQYANSTVTQLLERLDRVVEEGNLFDPARPSLGSELEALRQHLEALSAGPGTSGSHLDRSTVSSFSLDSVARNPQELWRFLTQNLSLPNSTAQALLAARVDPPEVYHLLFGPSSALDSQSGLHKGQEPWSRLGGNPLFRMEELLLAPALLEQLTCTPGSGELGRILTVPESQKGALQGYRDAVCSGQAAARARRFSGLSAELRNQLDVAKVSQQLGLDAPNGSDSSPQAPPPRRLQALLGDLLDAQKVLQDVDVLSALALLLPQGACTGRTPGPPASGAGGAANGTGAGAVMGPNATAEEGAPSAAALATPDTLQGQCSAFVQLWAGLQPILCGNNRTIEPEALRRGNMSSLGFTSKEQRNLGLLVHLMTSNPKILYAPAGSEVDRVILKANETFAFVGNVTHYAQVWLNISAEIRSFLEQGRLQQHLRWLQQYVAELRLHPEALNLSLDELPPALRQDNFSLPSGMALLQQLDTIDNAACGWIQFMSKVSVDIFKGFPDEESIVNYTLNQAYQDNVTVFASVIFQTRKDGSLPPHVHYKIRQNSSFTEKTNEIRRAYWRPGPNTGGRFYFLYGFVWIQDMMERAIIDTFVGHDVVEPGSYVQMFPYPCYTRDDFLFVIEHMMPLCMVISWVYSVAMTIQHIVAEKEHRLKEVMKTMGLNNAVHWVAWFITGFVQLSISVTALTAILKYGQVLMHSHVVIIWLFLAVYAVATIMFCFLVSVLYSKAKLASACGGIIYFLSYVPYMYVAIREEVAHDKITAFEKCIASLMSTTAFGLGSKYFALYEVAGVGIQWHTFSQSPVEGDDFNLLLAVTMLMVDAVVYGILTWYIEAVHPGMYGLPRPWYFPLQKSYWLGSGRTEAWEWSWPWARTPRLSVMEEDQACAMESRRFEETRGMEEEPTHLPLVVCVDKLTKVYKDDKKLALNKLSLNLYENQVVSFLGHNGAGKTTTMSILTGLFPPTSGSATIYGHDIRTEMDEIRKNLGMCPQHNVLFDRLTVEEHLWFYSRLKSMAQEEIRREMDKMIEDLELSNKRHSLVQTLSGGMKRKLSVAIAFVGGSRAIILDEPTAGVDPYARRAIWDLILKYKPGRTILLSTHHMDEADLLGDRIAIISHGKLKCCGSPLFLKGTYGDGYRLTLVKRPAEPGGPQEPGLASSPPGRAPLSSCSELQVSQFIRKHVASCLLVSDTSTELSYILPSEAAKKGAFERLFQHLERSLDALHLSSFGLMDTTLEEVFLKVSEEDQSLENSEADVKESRKDVLPGAEGPASGEGHAGNLARCSELTQSQASLQSASSVGSARGDEGAGYTDVYGDYRPLFDNPQDPDNVSLQEVEAEALSRVGQGSRKLDGGWLKVRQFHGLLVKRFHCARRNSKALFSQILLPAFFVCVAMTVALSVPEIGDLPPLVLSPSQYHNYTQPRGNFIPYANEERREYRLRLSPDASPQQLVSTFRLPSGVGATCVLKSPANGSLGPTLNLSSGESRLLAARFFDSMCLESFTQGLPLSNFVPPPPSPAPSDSPASPDEDLQAWNVSLPPTAGPEMWTSAPSLPRLVREPVRCTCSAQGTGFSCPSSVGGHPPQMRVVTGDILTDITGHNVSEYLLFTSDRFRLHRYGAITFGNVLKSIPASFGTRAPPMVRKIAVRRAAQVFYNNKGYHSMPTYLNSLNNAILRANLPKSKGNPAAYGITVTNHPMNKTSASLSLDYLLQGTDVVIAIFIIVAMSFVPASFVVFLVAEKSTKAKHLQFVSGCNPIIYWLANYVWDMLNYLVPATCCVIILFVFDLPAYTSPTNFPAVLSLFLLYGWSITPIMYPASFWFEVPSSAYVFLIVINLFIGITATVATFLLQLFEHDKDLKVVNSYLKSCFLIFPNYNLGHGLMEMAYNEYINEYYAKIGQFDKMKSPFEWDIVTRGLVAMAVEGVVGFLLTIMCQYNFLRRPQRMPVSTKPVEDDVDVASERQRVLRGDADNDMVKIENLTKVYKSRKIGRILAVDRLCLGVRPGECFGLLGVNGAGKTSTFKMLTGDESTTGGEAFVNGHSVLKELLQVQQSLGYCPQCDALFDELTAREHLQLYTRLRGISWKDEARVVKWALEKLELTKYADKPAGTYSGGNKRKLSTAIALIGYPAFIFLDEPTTGMDPKARRFLWNLILDLIKTGRSVVLTSHSMEECEALCTRLAIMVNGRLRCLGSIQHLKNRFGDGYMITVRTKSSQSVKDVVRFFNRNFPEAMLKERHHTKVQYQLKSEHISLAQVFSKMEQVSGVLGIEDYSVSQTTLDNVFVNFAKKQSDNLEQQETEPPSALQSPLGCLLSLLRPRSAPTELRALVADEPEDLDTEDEGLISFEEERAQLSFNTDTLC

SEQ ID NO: 4358 - protein, 2466 aa, Homo sapiens
MGRKTSRVQQGPPRSPACSAHGERSWGLEFPPFRWLLGIAGRTHLAALPPFQWVLAFEIFIPLVLFFILLGLRQKKPTISVKEVSFYTAAPLTSAGILPVMQSLCPDGQRDEFGFLQYANSTVTQLLERLDRVVEEGNLFDPARPSLGSELEALRQHLEALSAGPGTSGSHLDRSTVSSFSLDSVARNPQELWRFLTQNLSLPNSTAQALLAARVDPPEVYHLLFGPSSALDSQSGLHKGQEPWSRLGGNPLFRMEELLLAPALLEQLTCTPGSGELGRILTVPESQKGALQGYRDAVCSGQAAARARRFSGLSAELRNQLDVAKVSQQLGLDAPNGSDSSPQAPPPRRLQALLGDLLDAQKVLQDVDVLSALALLLPQGACTGRTPGPPASGAGGAANGTGAGAVMGPNATAEEGAPSAAALATPDTLQGQCSAFVQLWAGLQPILCGNNRTIEPEALRRGNMSSLGFTSKEQRNLGLLVHLMTSNPKILYAPAGSEVDRVILKANETFAFVGNVTHYAQVWLNISAEIRSFLEQGRLQQHLRWLQQYVAELRLHPEALNLSLDELPPALRQDNFSLPSGMALLQQLDTIDNAACGWIQFMSKVSVDIFKGFPDEESIVNYTLNQAYQDNVTVFASVIFQTRKDGSLPPHVHYKIRQNSSFTEKTNEIRRAYWRPGPNTGGRFYFLYGFVWIQDMMERAIIDTFVGHDVVEPGSYVQMFPYPCYTRDDFLFVIEHMMPLCMVISWVYSVAMTIQHIVAEKEHRLKEVMKTMGLNNAVHWVAWFITGFVQLSISVTALTAILKYGQVLMHSHVVIIWLFLAVYAVATIMFCFLVSVLYSKAKLASACGGIIYFLSYVPYMYVAIREEVAHDKITAFEKCIASLMSTTAFGLGSKYFALYEVAGVGIQWHTFSQSPVEGDDFNLLLAVTMLMVDAVVYGILTWYIEAVHPGMYGLPRPWYFPLQKSYWLGSGRTEAWEWSWPWARTPRLSVMEEDQACAMESRRFEETRGMEEEPTHLPLVVCVDKLTKVYKDDKKLALNKLSLNLYENQVVSFLGHNGAGKTTTMSILTGLFPPTSGSATIYGHDIRTEMDEIRKNLGMCPQHNVLFDRLTVEEHLWFYSRLKSMAQEEIRREMDKMIEDLELSNKRHSLVQTLSGGMKRKLSVAIAFVGGSRAIILDEPTAGVDPYARRAIWDLILKYKPGRTILLSTHHMDEADLLGDRIAIISHGKLKCCGSPLFLKGTYGDGYRLTLVKRPAEPGGPQEPGLASSPPGRAPLSSCSELQVSQFIRKHVASCLLVSDTSTELSYILPSEAAKKGAFERLFQHLERSLDALHLSSFGLMDTTLEEVFLKVSEEDQSLENSEADVKESRKDVLPGAEGPASGEGHAGNLARCSELTQSQASLQSASSVGSARGDEGAGYTDVYGDYRPLFDNPQDPDNVSLQEVEAEALSRVGQGSRKLDGGWLKVRQFHGLLVKRFHCARRNSKALFSQILLPAFFVCVAMTVALSVPEIGDLPPLVLSPSQYHNYTQPRGNFIPYANEERREYRLRLSPDASPQQLVSTFRLPSGVGATCVLKSPANGSLGPTLNLSSGESRLLAARFFDSMCLESFTQGLPLSNFVPPPPSPAPSDSPASPDEDLQAWNVSLPPTAGPEMWTSAPSLPRLVREPVRCTCSAQGTGFSCPSSVGGHPPQMRVVTGDILTDITGHNVSEYLLFTSDRFRLHRYGAITFGNVLKSIPASFGTRAPPMVRKIAVRRAAQVFYNNKGYHSMPTYLNSLNNAILRANLPKSKGNPAAYGITVTNHPMNKTSASLSLDYLLQGTDVVIAIFIIVAMSFVPASFVVFLVAEKSTKAKHLQFVSGCNPIIYWLANYVWDMLNYLVPATCCVIILFVFDLPAYTSPTNFPAVLSLFLLYGWSITPIMYPASFWFEVPSSAYVFLIVINLFIGITATVATFLLQLFEHDKDLKVVNSYLKSCFLIFPNYNLGHGLMEMAYNEYINEYYAKIGQFDKMKSPFEWDIVTRGLVAMAVEGVVGFLLTIMCQYNFLRRPQRMPVSTKPVEDDVDVASERQRVLRGDADNDMVKIENLTKVYKSRKIGRILAVDRLCLGVRPGECFGLLGVNGAGKTSTFKMLTGDESTTGGEAFVNGHSVLKELLQVQQSLGYCPQCDALFDELTAREHLQLYTRLRGISWKDEARVVKWALEKLELTKYADKPAGTYSGGNKRKLSTAIALIGYPAFIFLDEPTTGMDPKARRFLWNLILDLIKTGRSVVLTSHSMEECEALCTRLAIMVNGRLRCLGSIQHLKNRFGDGYMITVRTKSSQSVKDVVRFFNRNFPEAMLKERHHTKVQYQLKSEHISLAQVFSKMEQVSGVLGIEDYSVSQTTLDNVFVNFAKKQSDNLEQQETEPPSALQSPLGCLLSLLRPRSAPTELRALVADEPEDLDTEDEGLISFEEERAQLSFNTDTLC

SEQ ID NO: 4359 - protein, 523 aa, Homo sapiens
MAAVGRVGSFGSSPPGLSSTYTGGPLGNEIASGNGGAAAGDDEDGQNLWSCILSEVSTRSRSKLPAGKNVLLLGEDGAGKTSLIRKIQGIEEYKKGRGLEYLYLNVHDEDRDDQTRCNVWILDGDLYHKGLLKFSLDAVSLKDTLVMLVVDMSKPWTALDSLQKWASVVREHVDKLKIPPEEMKQMEQKLIRDFQEYVEPGEDFPASPQRRNTASQEDKDDSVVVPLGADTLTHNLGIPVLVVCTKCDAISVLEKEHDYRDEHFDFFQSHIRKFCLRYGAALIYTSVKENKNIDLVYKYIVQKLYGFPYKIPAVVVEKDAVFIPAGWDNDKKIGILHENFQTLKAEDNFEDIITKPPVRKFVHEKEIMAEDDQVFLMKLQSLLAKQPPTAAGRPVDASPRVPGGSPRTPNRSVSSNVASVSPIPAGSKKIDPNMKAGATSEGVLANFFNSLLSKKTGSPGGPGVSGGSPAGGAGGGSSGLPPSTKKSGQKPVLDVHAELDRITRKPVTVSPTTPTSPTEGEAS

SEQ ID NO: 4360 - protein, 1124 aa, Homo sapiens
MAPPSEETPLIPQRSCSLLSTEAGALHVLLPARGPGPPQRLSFSFGDHLAEDLCVQAAKASGILPVYHSLFALATEDLSCWFPPSHIFSVEDASTQVLLYRIRFYFPNWFGLEKCHRFGLRKDLASAILDLPVLEHLFAQHRSDLVSGRLPVGLSLKEQGECLSLAVLDLARMAREQAQRPGELLKTVSYKACLPPSLRDLIQGLSFVTRRRIRRTVRRALRRVAACQADRHSLMAKYIMDLERLDPAGAAETFHVGLPGALGGHDGLGLLRVAGDGGIAWTQGEQEVLQPFCDFPEIVDISIKQAPRVGPAGEHRLVTVTRTDNQILEAEFPGLPEALSFVALVDGYFRLTTDSQHFFCKEVAPPRLLEEVAEQCHGPITLDFAINKLKTGGSRPGSYVLRRSPQDFDSFLLTVCVQNPLGPDYKGCLIRRSPTGTFLLVGLSRPHSSLRELLATCWDGGLHVDGVAVTLTSCCIPRPKEKSNLIVVQRGHSPPTSSLVQPQSQYQLSQMTFHKIPADSLEWHENLGHGSFTKIYRGCRHEVVDGEARKTEVLLKVMDAKHKNCMESFLEAASLMSQVSYRHLVLLHGVCMAGDSTMVQEFVHLGAIDMYLRKRGHLVPASWKLQVVKQLAYALNYLEDKGLPHGNVSARKVLLAREGADGSPPFIKLSDPGVSPAVLSLEMLTDRIPWVAPECLREAQTLSLEADKWGFGATVWEVFSGVTMPISALDPAKKLQFYEDRQQLPAPKWTELALLIQQCMAYEPVQRPSFRAVIRDLNSLISSDYELLSDPTPGALAPRDGLWNGAQLYACQDPTIFEERHLKYISQLGKGNFGSVELCRYDPLGDNTGALVAVKQLQHSGPDQQRDFQREIQILKALHSDFIVKYRGVSYGPGRQSLRLVMEYLPSGCLRDFLQRHRARLDASRLLLYSSQICKGMEYLGSRRCVHRDLAARNILVESEAHVKIADFGLAKLLPLDKDYYVVREPGQSPIFWYAPESLSDNIFSRQSDVWSFGVVLYELFTYCDKSCSPSAEFLRMMGCERDVPALCRLLELLEEGQRLPAPPACPAEVHELMKLCWAPSPQDRPSFSALGPQLDMLWSGSRGCETHAFTAHPEGKHHSLSFS

SEQ ID NO: 4361 - protein, 209 aa, Homo sapiens
MGKGDPNKPRGKMSSYAFFVQTCREEHKKKHPDSSVNFAEFSKKCSERWKTMSAKEKSKFEDMAKSDKARYDREMKNYVPPKGDKKGKKKDPNAPKRPPSAFFLFCSEHRPKIKSEHPGLSIGDTAKKLGEMWSEQSAKDKQPYEQKAAKLKEKYEKDIAAYRAKGKSEAGKKGPGRPTGSKKKNEPEDEEEEEEEEDEDEEEEDEDEE

SEQ ID NO: 4362 - protein, 301 aa, Homo sapiens
MSCRDRTQEFLSACKSLQTRQNGIQTNKPALRAVRQRSEFTLMAKRIGKDLSNTFAKLEKLTILAKRKSLFDDKAVEIEELTYIIKQDINSLNKQIAQLQDFVRAKGSQSGRHLQTHSNTIVVSLQSKLASMSNDFKSVLEVRTENLKQQRSRREQFSRAPVSALPLAPNHLGGGAVVLGAESHASKDVAIDMMDSRTSQQLQLIDEQDSYIQSRADTMQNIESTIVELGSIFQQLAHMVKEQEETIQRIDENVLGAQLDVEAAHSEILKYFQSVTSNRWLMVKIFLILIVFFIIFVVFLA

SEQ ID NO: 4363 - protein, 329 aa, Homo sapiens
MAAQYGSMSFNPSTPGASYGPGRQEPRNSQLRIVLVGKTGAGKSATGNSILGRKVFHSGTAAKSITKKCEKRSSSWKETELVVVDTPGIFDTEVPNAETSKEIIRCILLTSPGPHALLLVVPLGRYTEEEHKATEKILKMFGERARSFMILIFTRKDDLGDTNLHDYLREAPEDIQDLMDIFGDRYCALNNKATGAEQEAQRAQLLGLIQRVVRENKEGCYTNRMYQRAEEEIQKQTQAMQELHRVELEREKARIREEYEEKIRKLEDKVEQEKRKKQMEKKLAEQEAHYAVRQQRARTEVESKDGILELIMTALQIASFILLRLFAED

SEQ ID NO: 4364 - protein, 429 aa, Homo sapiens
MATEQRPFHLVVFGASGFTGQFVTEEVAREQVDPERSSRLPWAVAGRSREKLQRVLEKAALKLGRPTLSSEVGIIICDIANPASLDEMAKQATVVLNCVGPYRFYGEPVIKACIENGASCIDISGEPQFLELMQLKYHEKAADKGVYIIGSSGFDSIPADLGVIYTRNKMNGTLTAVESFLTIHSGPEGLSIHDGTWKSAIYGFGDQSNLRKLRNVSNLKPVPLIGPKLKRRWPISYCRELKGYSIPFMGSDVSVVRRTQRYLYENLEESPVQYAAYVTVGGITSVIKLMFAGLFFLFFVRFGIGRQLLIKFPWFFSFGYFSKQGPTQKQIDAASFTLTFFGQGYSQGTGTDKNKPNIKICTQVKGPEAGYVATPIAMVQAAMTLLSDASHLPKAGGVFTPGAAFSKTKLIDRLNKHGIEFSVISSSEV

SEQ ID NO: 4365 - protein, 468 aa, Homo sapiens
MAASSNSSLSGSSVSSDAEEYQPPIWKSYLYQLQQEAPRPKRIICPREVENRPKYYGREFHGIISREQADELLGGVEGAYILRESQRQPGCYTLALRFGNQTLNYRLFHDGKHFVGEKRFESIHDLVTDGLITLYIETKAAEYISKMTTNPIYEHIGYATLLREKVSRRLSRSKNEPRKTNVTHEEHTAVEKISSLVRRAALTHNDNHFNYEKTHNFKVHTFRGPHWCEYCANFMWGLIAQGVRCSDCGLNVHKQCSKHVPNDCQPDLKRIKKVYCCDLTTLVKAHNTQRPMVVDICIREIEARGLKSEGLYRVSGFTEHIEDVKMAFDRDGEKADISANVYPDINIITGALKLYFRDLPIPVITYDTYSKFIDAAKISNADERLEAVHEVLMLLPPAHYETLRYLMIHLKKVTMNEKDNFMNAENLGIVFGPTLMRPPEDSTLTTLHDMRYQKLIVQILIENEDVLF

SEQ ID NO: 4366 - protein, 889 aa, Homo sapiens
MSYFGEHFWGEKNHGFEVLYHSVKQGPISTKELADFIRERATIEETYSKAMAKLSKLASNGTPMGTFAPLWEVFRVSSDKLALCHLELTRKLQDLIKDVLRYGEEQLKTHKKCKEEVVSTLDAVQVLSGVSQLLPKSRENYLNRCMDQERLRRESTSQKEMDKAETKTKKAAESLRRSVEKYNSARADFEQKMLDSALRFQAMEETHLRHMKALLGSYAHSVEDTHVQIGQVHEEFKQNIENVSVEMLLRKFAESKGTGREKPGPLDFEAYSAAALQEAMKRLRGAKAFRLPGLSRREREPEPPAAVDFLEPDSGTCPEVDEEGFTVRPDVTQNSTAEPSRFSSSDSDFDDEEPRKFYVHIKPAPARAPACSPEAAAAQLRATAGSLILPPGPGGTMKRHSSRDAAGKPQRPRSAPRTSSCAERLQSEEQVSKNLFGPPLESAFDHEDFTGSSSLGFTSSPSPFSSSSPENVEDSGLDSPSHAAPGPSPDSWVPRPGTPQSPPSCRAPPPEARGIRAPPLPDSPQPLASSPGPWGLEALAGGDLMPAPADPTAREGLAAPPRRLRSRKVSCPLTRSNGDLSRSLSPSPLGSSAASTALERPSFLSQTGHGVSRGPSPVVLGSQDALPIATAFTEYVHAYFRGHSPSCLARVTGELTMTFPAGIVRVFSGTPPPPVLSFRLVHTTAIEHFQPNADLLFSDPSQSDPETKDFWLNMAALTEALQRQAEQNPTASYYNVVLLRYQFSRPGPQSVPLQLSAHWQCGATLTQVSVEYGYRPGATAVPTPLTNVQILLPVGEPVTNVRLQPAATWNLEEKRLTWRLPDVSEAGGSGRLSASWEPLSGPSTPSPVAAQFTSEGTTLSGVDLELVGSGYRMSLVKRRFATGMYLVSC

SEQ ID NO: 4367 - protein, 258 aa, Homo sapiens
MPPQQGDPAFPDRCEAPPVPPRRERGGRGGRGPGEPGGRGRAGGAEGRGVKCVLVGDGAVGKTSLVVSYTTNGYPTEYIPTAFDNFSAVVSVDGRPVRLQLCDTAGQDEFDKLRPLCYTNTDIFLLCFSVVSPSSFQNVSEKWVPEIRCHCPKAPIILVGTQSDLREDVKVLIELDKCKEKPVPEEAAKLCAEEIKAASYIECSALTQKNLKEVFDAAIVAGIQYSDTQQQPKKSKSRTPDKMKNLSKSWWKKYCCFV

SEQ ID NO: 4368 - protein, 711 aa, Homo sapiens
MESGAVLLESKSSPFNLLHEMHELRLLGHLCDVTVSVEYQGVRKDFMAHKAVLAATSKFFKEVFLNEKSVDGTRTNVYLNEVQVADFASFLEFVYTAKVQVEEDRVQRMLEVAEKLKCLDLSETCFQLKKQMLESVLLELQNFSESQEVEVSSGSQVSAAPAPRASVATDGPHPSGLTDSLDYPGERASNGMSSDLPPKKSKDKLDKKKEVVKPPYPKIRRASGRLAGRKVFVEIPKKKYTRRLREQQKTAEGDVGDYRCPQDQSPDRVGTEMEQVSKNEGCQAGAELEELSKKAGPEEEEEEEEEDEEGEKKKSNFKCSICEKAFLYEKSFLKHSKHRHGVATEVVYRCDTCGQTFANRCNLKSHQRHVHSSERHFPCELCGKKFKRKKDVKRHVLQVHEGGGERHRCGQCGKGLSSKTALRLHERTHTGDRPYGCTECGARFSQPSALKTHMRIHTGEKPFVCDECGARFTQNHMLIYHKRCHTGERPFMCETCGKSFASKEYLKHHNRIHTGSKPFKCEVCFRTFAQRNSLYQHIKVHTGERPYCCDQCGKQFTQLNALQRHRRIHTGERPFMCNACGRTFTDKSTLRRHTSIHDKNTPWKSFLVIVDGSPKNDDGHKTEQPDEEYVSSKLSDKLLSFAENGHFHNLAAVQDTVPTMQENSSADTACKADDSVVSQDTLLATTISELSELTPQTDSMPTQLHSLSNME

SEQ ID NO: 4369 - protein, 210 aa, Homo sapiens
MSTKVPIYLKRGSRKGKKEKLRDLLSSDMISPPLGDFRHTIHIGSGGGSDMFGDISFLQGKFHLLPGTMVEGPEEDGTFDLPFQFTRTATVCGRELPDGPSPLLKNAISLPVIGGPQALTLPTAQAPPKPPRLHLETPQPSPQEGGSVDIWRIPETGSPNSGLTPESGAEEPFLSNASSLLSLHVDLGPSILDDVLQIMDQDLDSMQIPT

SEQ ID NO: 4370 - protein, 220 aa, Homo sapiens
MRQKHYLEAAARGLHDSCPGQARYLLWAYTSSHDDKSTFEETCPYCFQLLVLDNSRVRLKPKARLTPKIQKLLNREARNYTLSFKEAKMVKKFKDSKSVLLITCKTCNRTVKHHGKSRSFVSTLKSNPATPTSKLSLKTPERRTANPNHDMSGSKGKSPASVFRTPTSGQSVSTCSSKNTSKTKKHFSQLKMLLSQNESQKIPKVDFRNFLSSLKGGLLK

SEQ ID NO: 4371 - protein, 400 aa, Homo sapiens
MAAGGLSRSERKAAERVRRLREEQQRERLRQVSRILRKAAAERSAEEGRLLAESADLVTELQGRSRRREGLKRRQEEVCDDPEELRGKVRELASAVRNAKYLVVYTGAGISTAASIPDYRGPNGVWTLLQKGRSVSAADLSEAEPTLTHMSITRLHEQKLVQHVVSQNCDGLHLRSGLPRTAISELHGNMYIEVCTSCVPNREYVRVFDVTERTALHRHQTGRTCHKCGTQLRDTIVHFGERGTLGQPLNWEAATEAASRADTILCLGSSLKVLKKYPRLWCMTKPPSRRPKLYIVNLQWTPKDDWAALKLHGKCDDVMRLLMAELGLEIPAYSRWQDPIFSLATPLRAGEEGSHSRKSLCRSREEAPPGDRGAPLSSAPILGGWFGRGCTKRTKRKKVT

SEQ ID NO: 4372 - protein, 505 aa, Homo sapiens
MGRVVAELVSSLLGLWLLLCSCGCPEGAELRAPPDKIAIIGAGIGGTSAAYYLRQKFGKDVKIDLFEREEVGGRLATMMVQGQEYEAGGSVIHPLNLHMKRFVKDLGLSAVQASGGLLGIYNGETLVFEESNWFIINVIKLVWRYGFQFLRMHMWVEDVLDKFMRIYRYQSHDYAFSSVEKLLHALGGDDFLGMLNRTLLETLQKAGFSEKFLNEMIAPVMRVNYGQSTDINAFVGAVSLSCSDSGLWAVEGGNKLVCSGLLQASKSNLISGSVMYIEEKTKTKYTGNPTKMYEVVYQIGTETRSDFYDIVLVATPLNRKMSNITFLNFDPPIEEFHQYYQHIVTTLVKGELNTSIFSSRPIDKFGLNTVLTTDNSDLFINSIGIVPSVREKEDPEPSTDGTYVWKIFSQETLTKAQILKLFLSYDYAVKKPWLAYPHYKPPEKCPSIILHDRLYYLNGIECAASAMEMSAIAAHNAALLAYHRWNGHTDMIDQDGLYEKLKTEL

SEQ ID NO: 4373 - protein, 289 aa, Homo sapiens
MVCGRQLSGAGSETLKQRRTQIMSRGLPKQKPIEGVKQVIVVASGKGGVGKSTTAVNLALALAANDSSKAIGLLDVDVYGPSVPKMMNLKGNPELSQSNLMRPLLNYGIACMSMGFLVEESEPVVWRGLMVMSAIEKLLRQVDWGQLDYLVVDMPPGTGDVQLSVSQNIPITGAVIVSTPQDIALMDAHKGAEMFRRVHVPVLGLVQNMSVFQCPKCKHKTHIFGADGARKLAQTLGLEVLGDIPLHLNIREASDTGQPIVFSQPESDEAKAYLRIAVEVVRRLPSPSE

SEQ ID NO: 4374 - protein, 1123 aa, Homo sapiens
MWGDSRPANRTGPFRGSQEERFAPGWNRDYPPPPLKSHAQERHSGNFPGRDSLPFDFQGHSGPPFANVEEHSFSYGARDGPHGDYRGGEGPGHDFRGGDFSSSDFQSRDSSQLDFRGRDIHSGDFRDREGPPMDYRGGDGTSMDYRGREAPHMNYRDRDAHAVDFRGRDAPPSDFRGRGTYDLDFRGRDGSHADFRGRDLSDLDFRAREQSRSDFRNRDVSDLDFRDKDGTQVDFRGRGSGTTDLDFRDRDTPHSDFRGRHRSRTDQDFRGREMGSCMEFKDREMPPVDPNILDYIQPSTQDREHSGMNVNRREESTHDHTIERPAFGIQKGEFEHSETREGETQGVAFEHESPADFQNSQSPVQDQDKSQLSGREEQSSDAGLFKEEGGLDFLGRQDTDYRSMEYRDVDHRLPGSQMFGYGQSKSFPEGKTARDAQRDLQDQDYRTGPSEEKPSRLIRLSGVPEDATKEEILNAFRTPDGMPVKNLQLKEYNTGYDYGYVCVEFSLLEDAIGCMEANQGTLMIQDKEVTLEYVSSLDFWYCKRCKANIGGHRSSCSFCKNPREVTEAKQELITYPQPQKTSIPAPLEKQPNQPLRPADKEPEPRKREEGQESRLGHQKREAERYLPPSRREGPTFRRDRERESWSGETRQDGESKTIMLKRIYRSTPPEVIVEVLEPYVRLTTANVRIIKNRTGPMGHTYGFIDLDSHAEALRVVKILQNLDPPFSIDGKMVAVNLATGKRRNDSGDHSDHMHYYQGKKYFRDRRGGGRNSDWSSDTNRQGQQSSSDCYIYDSATGYYYDPLAGTYYDPNTQQEVYVPQDPGLPEEEEIKEKKPTSQGKSSSKKEMSKRDGKEKKDRGVTRFQENASEGKAPAEDVFKKPLPPTVKKEESPPPPKVVNPLIGLLGEYGGDSDYEEEEEEEQTPPPQPRTAQPQKREEQTKKENEEDKLTDWNKLACLLCRRQFPNKEVLIKHQQLSDLHKQNLEIHRKIKQSEQELAYLERREREGKFKGRGNDRREKLQSFDSPERKRIKYSRETDSDRKLVDKEDIDTSSKGGCVQQATGWRKGTGLGYGHPGLASSEEAEGRMRGPSVGASGRTSKRQSNETYRDAVRRVMFARYKELD

SEQ ID NO: 4375 - protein, 540 aa, Homo sapiens
MNGEAICSALPTIPYHKLADLRYLSRGASGTVSSARHADWRVQVAVKHLHIHTPLLDSERKDVLREAEILHKARFSYILPILGICNEPEFLGIVTEYMPNGSLNELLHRKTEYPDVAWPLRFRILHEIALGVNYLHNMTPPLLHHDLKTQNILLDNEFHVKIADFGLSKWRMMSLSQSRSSKSAPEGGTIIYMPPENYEPGQKSRASIKHDIYSYAVITWEVLSRKQPFEDVTNPLQIMYSVSQGHRPVINEESLPYDIPHRARMISLIESGWAQNPDERPSFLKCLIELEPVLRTFEEITFLEAVIQLKKTKLQSVSSAIHLCDKKKMELSLNIPVNHGPQEESCGSSQLHENSGSPETSRSLPAPQDNDFLSRKAQDCYFMKLHHCPGNHSWDSTISGSQRAAFCDHKTTPCSSAIINPLSTAGNSERLQPGIAQQWIQSKREDIVNQMTEACLNQSLDALLSRDLIMKEDYELVSTKPTRTSKVRQLLDTTDIQGEEFAKVIVQKLKDNKQMGLQPYPEILVVSRSPSLNLLQNKSM

SEQ ID NO: 4376 - protein, 1084 aa, Homo sapiens
MEQPKGVDWTVIILTCQYKDSVQVFQRELEVRQKREQIPAGTLLLAVEDPEKRVGSGGATLNALLVAAEHLSARAGFTVVTSDVLHSAWILILHMGRDFPFDDCGRAFTCLPVENPEAPVEALVCNLDCLLDIMTYRLGPGSPPGVWVCSTDMLLSVPANPGISWDSFRGARVIALPGSPAYAQNHGVYLTDPQGLVLDIYYQGTEAEIQRCVRPDGRVPLVSGVVFFSVETAERLLATHVSPPLDACTYLGLDSGARPVQLSLFFDILHCMAENVTREDFLVGRPPELGQGDADVAGYLQSARAQLWRELRDQPLTMAYVSSGSYSYMTSSASEFLLSLTLPGAPGAQIVHSQVEEQQLLAAGSSVVSCLLEGPVQLGPGSVLQHCHLQGPIHIGAGCLVTGLDTAHSKALHGRELRDLVLQGHHTRLHGSPGHAFTLVGRLDSWERQGAGTYLNVPWSEFFKRTGVRAWDLWDPETLPAEYCLPSARLFPVLHPSRELGPQDLLWMLDHQEDGGEALRAWRASWRLSWEQLQPCLDRAATLASRRDLFFRQALHKARHVLEARQDLSLRPLIWAAVREGCPGPLLATLDQVAAGAGDPGVAARALACVADVLGCMAEGRGGLRSGPAANPEWMRPFSYLECGDLAAGVEALAQERDKWLSRPALLVRAARHYEGAGQILIRQAVMSAQHFVSTEQVELPGPGQWVVAECPARVDFSGGWSDTPPLAYELGGAVLGLAVRVDGRRPIGARARRIPEPELWLAVGPRQDEMTVKIVCRCLADLRDYCQPHAPGALLKAAFICAGIVHVHSELQLSEQLLRTFGGGFELHTWSELPHGSGLGTSSILAGTALAALQRAAGRVVGTEALIHAVLHLEQVLTTGGGWQDQVGGLMPGIKVGRSRAQLPLKVEVEEVTVPEGFVQKLNDHLLLVYTGKTRLARNLLQDVLRSWYARLPAVVQNAHSLVRQTEECAEGFRQGSLPLLGQCLTSYWEQKKLMAPGCEPLTVRRMMDVLAPHVHGQSLAGAGGGGFLYLLTKEPQQKEALEAVLAKTEGLGNYSIHLVEVDTQGLSLKLLGTEASTCCPFP

SEQ ID NO: 4377 - protein, 156 aa, Homo sapiens
MTTNPKPNKALKVKKEAGENAPVLSDDELVSMSVRELNQHLRGLTKEEVTRLKQRRRTLKNRGYAASCRIKRVTQKEELERQRVELQQEVEKLARENSSMRLELDALRSKYEALQTFARTVARGPVAPSKVATTSVITIVKSTELSSTSVPFSAAS

SEQ ID NO: 4378 - protein, 747 aa, Homo sapiens
MGRGPWDAGPSRRLLPLLLLLGLARGAAGAPGPDGLDVCATCHEHATCQQREGKKICICNYGFVGNGRTQCVDKNECQFGATLVCGNHTSCHNTPGGFYCICLEGYRATNNNKTFIPNDGTFCTDIDECEVSGLCRHGGRCVNTHGSFECYCMDGYLPRNGPEPFHPTTDATSCTEIDCGTPPEVPDGYIIGNYTSSLGSQVRYACREGFFSVPEDTVSSCTGLGTWESPKLHCQEINCGNPPEMRHAILVGNHSSRLGGVARYVCQEGFESPGGKITSVCTEKGTWRESTLTCTEILTKINDVSLFNDTCVRWQINSRRINPKISYVISIKGQRLDPMESVREETVNLTTDSRTPEVCLALYPGTNYTVNISTAPPRRSMPAVIGFQTAEVDLLEDDGSFNISIFNETCLKLNRRSRKVGSEHMYQFTVLGQRWYLANFSHATSFNFTTREQVPVVCLDLYPTTDYTVNVTLLRSPKRHSVQITIATPPAVKQTISNISGFNETCLRWRSIKTADMEEMYLFHIWGQRWYQKEFAQEMTFNISSSSRDPEVCLDLRPGTNYNVSLRALSSELPVVISLTTQITEPPLPEVEFFTVHRGPLPRLRLRKAKEKNGPISSYQVLVLPLALQSTFSCDSEGASSFFSNASDADGYVAAELLAKDVPDDAMEIPIGDRLYYGEYYNAPLKRGSDYCIILRITSEWNKVRRHSCAVWAQVKDSSLMLLQMAGVGLGSLAVVIILTFLSFSAV

SEQ ID NO: 4379 - protein, 81 aa, Homo sapiens
MLIKVKTLTGKEIEIDIEPTDKVERIKERVEEKEGIPPQQQRLIYSGKQMNDEKTAADYKILGGSVLHLVLALRGGGGLRQ

SEQ ID NO: 4380 - protein, 568 aa, Homo sapiens
MLPGLAAAAAHRCSWSSLCRLRLRCRAAACNPSDRQEWQNLVTFGSFSNMVPCSHPYIGTLSQVKLYSTNVQKEGQGSQTLRVEKVPSFETAEGIGTELKAPLKQEPLQVRVKAVLKKREYGSKYTQNNFITGVRAINEFCLKSSDLEQLRKIRRRSPHEDTESFTVYLRSDVEAKSLEVWGSPEALAREKKLRKEAEIEYRERLFRNQKILREYRDFLGNTKPRSRTASVFFKGPGKVVMVAICINGLNCFFKFLAWIYTGSASMFSEAIHSLSDTCNQGLLALGISKSVQTPDPSHPYGFSNMRYISSLISGVGIFMMGAGLSWYHGVMGLLHPQPIESLLWAYCILAGSLVSEGATLLVAVNELRRNARAKGMSFYKYVMESRDPSTNVILLEDTAAVLGVIIAATCMGLTSITGNPLYDSLGSLGVGTLLGMVSAFLIYTNTEALLGRSIQPEQVQRLTELLENDPSVRAIHDVKATDLGLGKVRFKAEVDFDGRVVTRSYLEKQDFDQMLQEIQEVKTPEELETFMLKHGENIIDTLGAEVDRLEKELKKRNPEVRHVDLEIL

SEQ ID NO: 4381 - protein, 209 aa, Homo sapiens
MEGGGGSGNKTTGGLAGFFGAGGAGYSHADLAGVPLTGMNPLSPYLNVDPRYLVQDTDEFILPTGANKTRGRFELAFFTIGGCCMTGAAFGAMNGLRLGLKETQNMAWSKPRNVQILNMVTRQGALWANTLGSLALLYSAFGVIIEKTRGAEDDLNTVAAGTMTGMLYKCTGGLRGIARGGLTGLTLTSLYALYNNWEHMKGSLLQQSL

SEQ ID NO: 4382 - protein, 75 aa, Homo sapiens
MGELTDALLGKGALKTRFGSLLGQGDWGGVRVSQVEVRWVIFCLLHWLHVNLPVTEYLALDVLFPLAIVQKHSIL

SEQ ID NO: 4383 - protein, 499 aa, Homo sapiens
  MOD_RES 498: Xaa = Selenocysteine
MNGPEDLPKSYDYDLIIIGGGSGGLAAAKEAAQYGKKVMVLDFVTPTPLGTRWGLGGTCVNVGCIPKKLMHQAALLGQALQDSRNYGWKVEETVKHDWDRMIEAVQNHIGSLNWGYRVALREKKVVYENAYGQFIGPHRIKATNNKGKEKIYSAERFLIATGERPRYLGIPGDKEYCISSDDLFSLPYCPGKTLVVGASYVALECAGFLAGIGLDVTVMVRSILLRGFDQDMANKIGEHMEEHGIKFIRQFVPIKVEQIEAGTPGRLRVVAQSTNSEEIIEGEYNTVMLAIGRDACTRKIGLETVGVKINEKTGKIPVTDEEQTNVPYIYAIGDILEDKVELTPVAIQAGRLLAQRLYAGSTVKCDYENVPTTVFTPLEYGACGLSEEKAVEKFGEENIEVYHSYFWPLEWTIPSRDNNKCYAKIICNTKDNERVVGFHVLGPNAGEVTQGFAAALKCGLTKKQLDSTIGIHPVCAEVFTTLSVTKRSGASILQAGCXG

SEQ ID NO: 4384 - protein, 499 aa, Homo sapiens; identical to SEQ ID NO: 4383
  MOD_RES 498: Xaa = Selenocysteine

SEQ ID NO: 4385 - protein, 499 aa, Homo sapiens; identical to SEQ ID NO: 4383
  MOD_RES 498: Xaa = Selenocysteine

SEQ ID NO: 4386 - protein, 499 aa, Homo sapiens; identical to SEQ ID NO: 4383
  MOD_RES 498: Xaa = Selenocysteine

SEQ ID NO: 4387 - protein, 322 aa, Homo sapiens
MADRDSGSEQGGAALGSGGSLGHPGSGSGSGGGGGGGGGGGGSGGGGGGAPGGLQHETQELASKRVDIQNKRFYLDVKQNAKGRFLKIAEVGAGGNKSRLTLSMSVAVEFRDYLGDFIEHYAQLGPSQPPDLAQAQDEPRRALKSEFLVRENRKYYMDLKENQRGRFLRIRQTVNRGPGLGSTQGQTIALPAQGLIEFRDALAKLIDDYGVEEEPAELPEGTSLTVDNKRFFFDVGSNKYGVFMRVSEVKPTYRNSITVPYKVWAKFGHTFCKYSEEMKKIQEKQREKRAACEQLHQQQQQQQEETAAATLLLQGEEEGEED

SEQ ID NO: 4388 - protein, 359 aa, Homo sapiens
MAPMGIRLSPLGVAVFCLLGLGVLYHLYSGFLAGRFSLFGLGGEPGGGAAEPAAAADGGTVDLREMLAVSVLAAVRGGDEVRRVRESNVLHEKSKGKTREGAEDKMTSGDVLSNRKMFYLLKAAFPSVQINTEEHVDAADQEVILWDHKIPEDILEEVTTPKEVPAESVTVWIDPLDATQEYTEDLRKYVTTMVCVAVNGKPMLGVIHKPFSEYTAWAMVDGGSNVKARSSYNEKTPRIVVSRSHSGMVKQVALQTFGNQTTIIPAGGAGYKVLALLDVPDKSQEKADLYIHVTYIKKWDICAGNAILKALGGHMTTLSGEEISYTGSDGIEGGLLASIRMNHQALVRKLPDLEKTGHK

SEQ ID NO: 4389 - protein, 1148 aa, Homo sapiens
MTTPTRRSTRNTRAETASQSQRSPISDNSGCDAPGNSNPSLSVPSSAESEKQTRQAPKRKSVRRGRKPPLLKKKLRSSVAAPEKSSSNDSVDEETAESDTSPVLEKEHQPDVDSSNICTVQTHVENQSANCLKSCNEQIEESEKHTANYDTEERVGSSSSESCAQDLPVLVGEEGEVKKLENTGIEANVLCLESEISENILEKGGDPLEKQDQISGLSQSEVKTDVCTVHLPNDFPTCLTSESKVYQPVSCPLSDLSENVESVVNEEKITESSLVEITEHKDFTLKTEELIESPKLESSEGEIIQTVDRQSVKSPEVQLLGHVETEDVEIIATCDTFGNEDFNNIQDSENNLLKNNLLNTKLEKSLEEKNESLTEHPRSTELPKTHIEQIQKHFSEDNNEMIPMECDSFCSDQNESEVEPSVNADLKQMNENSVTHCSENNMPSSDLADEKVETVSQPSESPKDTIDKTKKPRTRRSRFHSPSTTWSPNKDTPQEKKRPQSPSPRRETGKESRKSQSPSPKNESARGRKKSRSQSPKKDIARERRQSQSRSPKRDTTRESRRSESLSPRRETSRENKRSQPRVKDSSPGEKSRSQSRERESDRDGQRRERERRTRKWSRSRSHSRSPSRCRTKSKSSSFGRIDRDSYSPRWKGRWANDGWRCPRGNDRYRKNDPEKQNENTRKEKNDIHLDADDPNSADKHRNDCPNWITEKINSGPDPRTRNPEKLKESHWEENRNENSGNSWNKNFGSGWVSNRGRGRGNRGRGTYRSSFAYKDQNENRWQNRKPLSGNSNSSGSESFKFVEQQSYKRKSEQEFSFDTPADRSGWTSASSWAVRKTLPADVQNYYSRRGRNSSGPQSGWMKQEEETSGQDSSLKDQTNQQVDGSQLPINMMQPQMNVMQQQMNAQHQPMNIFPYPVGVHAPLMNIQRNPFNIHPQLPLHLHTGVPLMQVATPTSVSQGLPPPPPPPPPSQQVNYIASQPDGKQLQGIPSSSHVSNNMSTPVLPAPTAAPGNTGMVQGPSSGNTSSSSHSKASNAAVKLAESKVSVAVEASADSSKTDKKLQIQEKAAQEVKLAIKPFYQNKDITKEEYKEIVRKAVDKVCHSKSGEVNSTKVANLVKAYVDKYKYSRKGSQKKTLEEPVSTEKNIG

SEQ ID NO: 4390 - protein, 323 aa, Homo sapiens
MADKQISLPAKLINGGIAGLIGVTCVFPIDLAKTRLQNQQNGQRVYTSMSDCLIKTVRSEGYFGMYRGAAVNLTLVTPEKAIKLAANDFFRHQLSKDGQKLTLLKEMLAGCGAGTCQVIVTTPMEMLKIQLQDAGRIAAQRKILAAQGQLSAQGGAQPSVEAPAAPRPTATQLTRDLLRSRGIAGLYKGLGATLLRDVPFSVVYFPLFANLNQLGRPASEEKSPFYVSFLAGCVAGSAAAVAVNPCDVVKTRLQSLQRGVNEDTYSGILDCARKILRHEGPSAFLKGAYCRALVIAPLFGIAQVVYFLGIAESLLGLLQDPQA

SEQ ID NO: 4391 - protein, 406 aa, Homo sapiens
MAAAVRQDLAQLMNSSGSHKDLAGKYRQILEKAIQLSGAEQLEALKAFVEAMVNENVSLVISRQLLTDFCTHLPNLPDSTAKEIYHFTLEKIQPRVISFEEQVASIRQHLASIYEKEEDWRNAAQVLVGIPLETGQKQYNVDYKLETYLKIARLYLEDDDPVQAEAYINRASLLQNESTNEQLQIHYKVCYARVLDYRRKFIEAAQRYNELSYKTIVHESERLEALKHALHCTILASAGQQRSRMLATLFKDERCQQLAAYGILEKMYLDRIIRGNQLQEFAAMLMPHQKATTADGSSILDRAVIEHNLLSASKLYNNITFEELGALLEIPAAKAEKIASQMITEGRMNGFIDQIDGIVHFETREALPTWDKQIQSLCFQVNNLLEKISQTAPEWTAQAMEAQMAQ

SEQ ID NO: 4392 - protein, 331 aa, Homo sapiens
MGRCRSVKEFEKLNRIGEGTYGIVYRARDTQTDEIVALKKVRMDKEKDGIPISSLREITLLLRLRHPNIVELKEVVVGNHLESIFLVMGYCEQDLASLLENMPTPFSEAQVKCIVLQVLRGLQYLHRNFIIHRDLKVSNLLMTDKGCVKTADFGLARAYGVPVKPMTPKVVTLWYRAPELLLGTTTQTTSIDMWAVGCILAELLAHRPLLPGTSEIHQIDLIVQLLGTPSENIWPGFSKLPLVGQYSLRKQPYNNLKHKFPWLSEAGLRLLHFLFMYDPKKRATAGDCLESSYFKEKPLPCEPELMPTFPHHRNKRAAPATSEGQSKRCKP

SEQ ID NO: 4393 - protein, 314 aa, Homo sapiens
MGRCRSVKEFEKLNRIGEGTYGIVYRARDTQTDEIVALKKVRMDKEKDGIPISSLREITLLLRLRHPNIVELKEVVVGNHLESIFLVMGYCEQDLASLLENMPTPFSEAQVKCIVLQVLRGLQYLHRNFIIHRDLKVSNLLMTDKGCVKTADFGLARAYGVPVKPMTPKVVTLWYRAPELLLGTTTQTTSIDMWAVGCILAELLAHRPLLPGTSEIHQIDLIVQLLGTPSENIWPGFSKLPLVGQYSLRKQPYNNLKHKFPWLSEAGLRLLHFLFMYDPKKRATAGDCLESSYFKEKPLRLPISGVCEGCREPG

SEQ ID NO: 4394 - protein, 123 aa, Homo sapiens
MDKEKDGIPISSLREITLLLRLRHPNIVELKEVVVGNHLESIFLVMGYCEQDLASLLENMPTPFSEAQVKCIVLQVLRGLQYLHRNFIIHRDLKVSNLLMTDKGCVKTGGCNLGQALSLDGTW

SEQ ID NO: 4395 - protein, 99 aa, Homo sapiens
MTSKLAVALLAAFLISAALCEGAVLPRSAKELRCQCIKTYSKPFHPKFIKELRVIESGPHCANTEIIVKLSDGRELCLDPKENWVQRVVEKFLKRAENS

SEQ ID NO: 4396 - protein, 301 aa, Homo sapiens
MHPEPAPPPSRSSPELPPSGGSTTSGSRRSRRRSGDGEPPGAPPPPPSAVTYPDWIGQSYSEVMSLNEHSMQALSWRKLYLSRAKLKASSRTSALLSGFAMVAMVEVQLDADHDYPPGLLIAFSACTTVLVAVHLFALMISTCILPNIEAVSNVHNLNSVKESPHERMHRHIELAWAFSTVIGTLLFLAEVVLLCWVKFLPLKKQPGQPRPTSKPPASGAAANVSTSGITPGQAAAIASTTIMVPFGLIFIVFAVHFYRSLVSHKTDRQFQELNELAEFARLQDQLDHRGDHPLTPGSHYA

SEQ ID NO: 4397 - protein, 270 aa, Homo sapiens
MARFALTVVRHGETRFNKEKIIQGQGVDEPLSETGFKQAAAAGIFLNNVKFTHAFSSDLMRTKQTMHGILERSKFCKDMTVKYDSRLRERKYGVVEGKALSELRAMAKAAREECPVFTPPGGETLDQVKMRGIDFFEFLCQLILKEADQKEQFSQGSPSNCLETSLAEIFPLGKNHSSKVNSDSGIPGLAASVLVVSHGAYMRSLFDYFLTDLKCSLPATLSRSELMSVTPNTGMSLFIINFEEGREVKPTVQCICMNLQDHLNGLTETR

SEQ ID NO: 4398 - protein, 157 aa, Homo sapiens [sequence omitted]

SEQ ID NO: 4399 - protein, 169 aa, Homo sapiens
MAAESLPFSFGTLSSWELEAWYEDLQEVLSSDENGGTYVSPPGNEEEESKIFTTLDPASLAWLTEEEPEPAEVTSTSQSPHSPDSSQSSLAQEEEEEDQGRTRKRKQSGHSPARAGKQRMKEKEQENERKVAQLAEENERLKQEIERLTREVEATRRALIDRMVNLHQA

SEQ ID NO: 4400 - protein, 317 aa, Homo sapiens
MGYDVTRFQGDVDEDLICPICSGVLEEPVQAPHCEHAFCNACITQWFSQQQTCPVDRSVVTVAHLRPVPRIMRNMLSKLQIACDNAVFGCSAVVRLDNLMSHLSDCEHNPKRPVTCEQGCGLEMPKDELPNHNCIKHLRSVVQQQQTRIAELEKTSAEHKHQLAEQKRDIQLLKAYMRAIRSVNPNLQNLEETIEYNEILEWVNSLQPARVTRWGGMISTPDAVLQAVIKRSLVESGCPASIVNELIENAHERSWPQGLATLETRQMNRRYYENYVAKRIPGKQAVVVMACENQHMGDDMVQEPGLVMIFAHGVEEI

SEQ ID NO: 4401 - protein, 246 aa, Homo sapiens
MRNMLSKLQIACDNAVFGCSAVVRLDNLMSHLSDCEHNPKRPVTCEQGCGLEMPKDELPNHNCIKHLRSVVQQQQTRIAELEKTSAEHKHQLAEQKRDIQLLKAYMRAIRSVNPNLQNLEETIEYNEILEWVNSLQPARVTRWGGMISTPDAVLQAVIKRSLVESGCPASIVNELIENAHERSWPQGLATLETRQMNRRYYENYVAKRIPGKQAVVVMACENQHMGDDMVQEPGLVMIFAHGVEEI

SEQ ID NO: 4402 - protein, 317 aa, Homo sapiens; identical to SEQ ID NO: 4400

SEQ ID NO: 4403 - protein, 468 aa, Homo sapiens
MLAVGCALLAALLAAPGAALAPRRCPAQEVARGVLTSLPGDSVTLTCPGVEPEDNATVHWVLRKPAAGSHPSRWAGMGRRLLLRSVQLHDSGNYSCYRAGRPAGTVHLLVDVPPEEPQLSCFRKSPLSNVVCEWGPRSTPSLTTKAVLLVRKFQNSPAEDFQEPCQYSQESQKFSCQLAVPEGDSSFYIVSMCVASSVGSKFSKTQTFQGCGILQPDPPANITVTAVARNPRWLSVTWQDPHSWNSSFYRLRFELRYRAERSKTFTTWMVKDLQHHCVIHDAWSGLRHVVQLRAQEEFGQGEWSEWSPEAMGTPWTESRSPPAENEVSTPMQALTTNKDDDNILFRDSANATSLPVQDSSSVPLPTFLVAGGSLAFGTLLCIAIVLRFKKTWKLRALKEGKTSMHPPYSLGQLVPERPRPTPVLVPLISPPVSPSSLGSDNTSSHNRPDARDPRSPYDISNTDYFFPR

SEQ ID NO: 4404 - protein, 365 aa, Homo sapiens [sequence omitted]

SEQ ID NO: 4405 - protein, 277 aa, Homo sapiens
MASAGGEDCESPAPEADRPHQRPFLIGVSGGTASGKSTVCEKIMELLGQNEVEQRQRKVVILSQDRFYKVLTAEQKAKALKGQYNFDHPDAFDNDLMHRTLKNIVEGKTVEVPTYDFVTHSRLPETTVVYPADVVLFEGILVFYSQEIRDMFHLRLFVDTDSDVRLSRRVLRDVRRGRDLEQILTQYTTFVKPAFEEFCLPTKKYADVIIPRGVDNMVAINLIVQHIQDILNGDICKWHRGGSNGRSYKRTFSEPGDHPGMLTSGKRSHLESSSRPH

SEQ ID NO: 4406 - protein, 81 aa, Homo sapiens [sequence omitted]

SEQ ID NO: 4407 - protein, 688 aa, Homo sapiens
MDGSFVQHSVRVLQELNKQREKGQYCDATLDVGGLVFKAHWSVLACCSHFFQSLYGDGSGGSVVLPAGFAEIFGLLLDFFYTGHLALTSGNRDQVLLAARELRVPEAVELCQSFKPKTSVGQAAGGQSGLGPPASQNVNSHVKEPAGLEEEEVSRTLGLVPRDQEPRGSHSPQRPQLHSPAQSEGPSSLCGKLKQALKPCPLEDKKPEDCKVPPRPLEAEGAQLQGGSNEWEVVVQVEDDGDGDYMSEPEAVLTRRKSNVIRKPCAAEPALSAGSLAAEPAENRKGTAVPVECPTCHKKFLSKYYLKVHNRKHTGEKPFECPKCGKCYFRKENLLEHEARNCMNRSEQVFTCSVCQETFRRRMELRVHMVSHTGEMPYKCSSCSQQFMQKKDLQSHMIKLHGAPKPHACPTCAKCFLSRTELQLHEAFKHRGEKLFVCEECGHRASSRNGLQMHIKAKHRNERPHVCEFCSHAFTQKANLNMHLRTHTGEKPFQCHLCGKTFRTQASLDKHNRTHTGERPFSCEFCEQRFTEKGPLLRHVASRHQEGRPHFCQICGKTFKAVEQLRVHVRRHKGVRKFECTECGYKFTRQAHLRRHMEIHDRVENYNPRQRKLRNLIIEDEKMVVVALQPPAELEVGSAEVIVESLAQGGLASQLPGQRLCAEESFTGPGVLEPSLIITAAVPEDCDT

SEQ ID NO: 4408 - protein, 1155 aa, Homo sapiens
MAASRDLLKEFPQPKNLLNSVIGRALGISHAKDKLVYVHTNGPKKKKVTLHIKWPKSVEVEGYGSKKIDAERQAAAAACQLFKGWGLLGPRNELFDAAKYRVLADRFGSPADSWWRPEPTMPPTSWRQLNPESIRPGGPGGLSRSLGREEEEDEEEELEEGTIDVTDFLSMTQQDSHAPLRDSRGSSFEMTDDDSAIRALTQFPLPKNLLAKVIQIATSSSTAKNLMQFHTVGTKTKLSTLTLLWPCPMTFVAKGRRKAEAENKAAALACKKLKSLGLVDRNNEPLTHAMYNLASLRELGETQRRPCTIQVPEPILRKIETFLNHYPVESSWIAPELRLQSDDILPLGKDSGPLSDPITGKPYVPLLEAEEVRLSQSLLELWRRRGPVWQEAPQLPVDPHRDTILNAIEQHPVVVISGDTGCGKTTRIPQLLLERYVTEGRGARCNVIITQPRRISAVSVAQRVSHELGPSLRRNVGFQVRLESKPPSRGGALLFCTVGILLRKLQSNPSLEGVSHVIVDEVHERDVNTDFLLILLKGLQRLNPALRLVLMSATGDNERFSRYFGGCPVIKVPGFMYPVKEHYLEDILAKLGKHQYLHRHRHHESEDECALDLDLVTDLVLHIDARGEPGGILCFLPGWQEIKGVQQRLQEALGMHESKYLILPVHSNIPMMDQKAIFQQPPVGVRKIVLATNIAETSITINDIVHVVDSGLHKEERYDLKTKVSCLETVWVSRANVIQRRGRAGRCQSGFAYHLFPRSRLEKMVPFQVPEILRTPLENLVLQAKIHMPEKTAVEFLSKAVDSPNIKAVDEAVILLQEIGVLDQREYLTTLGQRLAHISTDPRLAKAIVLAAIFRCLHPLLVVVSCLTRDPFSSSLQNRAEVDKVKALLSHDSGSDHLAFVRAVAGWEEVLRWQDRSSRENYLEENLLYAPSLRFIHGLIKQFSENIYEAFLVGKPSDCTLASAQCNEYSEEEELVKGVLMAGLYPNLIQVRQGKVTRQGKFKPNSVTYRTKSGNILLHKSTINREATRLRSRWLTYFMAVKSNGSVFVRDSSQVHPLAVLLLTDGDVHIRDDGRRATISLSDSDLLRLEGDSRTVRLLKELRRALGRMVERSLRSELAALPPSVQEEHGQLLALLAELLRGPCGSFDVRKTADD

SEQ ID NO: 4409 - protein, 361 aa, Homo sapiens
MAAARRLMALAAGISPRLQPLGPRAAGRQGRSRGFSSSCAHPDHTKEAAEAESGMAPGGPGEGDGSLVNASRDLLKEFPQPKNLLNSVIGRALGISHAKDKLVYVHTNGPKKKKVTLHIKWPKSVEVEGYGSKKIDAERQAAAAACQLFKGWGLLGPRNELFDAAKYRVLADRFGSPADSWWRPEPTMPPTSWRQLNPESIRPGGPGGLSRSLGREEEEDEEEELEEGTIDVTDFLSMTQQDSHAPLRDSRGSSFEMTDDDSAIRALTQFPLPKNLLAKVIQIATSSSTAKNLMQFHTVGTKTKLSTLTLLWPCPMTFVAKGRRKAEAENKAAALACKKLKSLGLVDRNNEPLTHGYGADG

SEQ ID NO: 4410 - protein, 1194 aa, Homo sapiens
MFSLDSFRKDRAQHRQRQCKLPPPRLPPMCVNPTPGGTISRASRDLLKEFPQPKNLLNSVIGRALGISHAKDKLVYVHTNGPKKKKVTLHIKWPKSVEVEGYGSKKIDAERQAAAAACQLFKGWGLLGPRNELFDAAKYRVLADRFGSPADSWWRPEPTMPPTSWRQLNPESIRPGGPGGLSRSLGREEEEDEEEELEEGTIDVTDFLSMTQQDSHAPLRDSRGSSFEMTDDDSAIRALTQFPLPKNLLAKVIQIATSSSTAKNLMQFHTVGTKTKLSTLTLLWPCPMTFVAKGRRKAEAENKAAALACKKLKSLGLVDRNNEPLTHAMYNLASLRELGETQRRPCTIQVPEPILRKIETFLNHYPVESSWIAPELRLQSDDILPLGKDSGPLSDPITGKPYVPLLEAEEVRLSQSLLELWRRRGPVWQEAPQLPVDPHRDTILNAIEQHPVVVISGDTGCGKTTRIPQLLLERYVTEGRGARCNVIITQPRRISAVSVAQRVSHELGPSLRRNVGFQVRLESKPPSRGGALLFCTVGILLRKLQSNPSLEGVSHVIVDEVHERDVNTDFLLILLKGLQRLNPALRLVLMSATGDNERFSRYFGGCPVIKVPGFMYPVKEHYLEDILAKLGKHQYLHRHRHHESEDECALDLDLVTDLVLHIDARGEPGGILCFLPGWQEIKGVQQRLQEALGMHESKYLILPVHSNIPMMDQKAIFQQPPVGVRKIVLATNIAETSITINDIVHVVDSGLHKEERYDLKTKVSCLETVWVSRANVIQRRGRAGRCQSGFAYHLFPRSRLEKMVPFQVPEILRTPLENLVLQAKIHMPEKTAVEFLSKAVDSPNIKAVDEAVILLQEIGVLDQREYLTTLGQRLAHISTDPRLAKAIVLAAIFRCLHPLLVVVSCLTRDPFSSSLQNRAEVDKVKALLSHDSGSDHLAFVRAVAGWEEVLRWQDRSSRENYLEENLLYAPSLRFIHGLIKQFSENIYEAFLVGKPSDCTLASAQCNEYSEEEELVKGVLMAGLYPNLIQVRQGKVTRQGKFKPNSVTYRTKSGNILLHKSTINREATRLRSRWLTYFMAVKSNGSVFVRDSSQVHPLAVLLLTDGDVHIRDDGRRATISLSDSDLLRLEGDSRTVRLLKELRRALGRMVERSLRSELAALPPSVQEEHGQLLALLAELLRGPCGSFDVRKTADD

SEQ ID NO: 4411 - protein, 410 aa, Homo sapiens
MFNNELMADVHFVVGPPGATRTVPAHKYVLAVGSSVFYAMFYGDLAEVKSEIHIPDVEPAAFLILLKYMYSDEIDLEADTVLATLYAAKKYIVPALAKACVNFLETSLEAKNACVLLSQSRLFEEPELTQRCWEVIDAQAEMALRSEGFCEIDRQTLEIIVTREALNTKEAVVFEAVLNWAEAECKRQGLPITPRNKGHVLGRALYLVRIPTMTLEEFANGAAQSDILTLEETHSIFLWYTATNKPRLDFPLTKRKGLAPQRCHRFQSSAYRSNQWRYRGRCDSIQFAVDRRVFIAGLGLYGSSSGKAEYSVKIELKRLGVVLAQNLTKFMSDGSSNTFPVWFEHPVQVEQDTFYTASAVLDGSELSYFGQEGMTEVQCGKVAFQFQCSSDSTNGTGVQGGQIPELIFYA

SEQ ID NO: 4412 - protein, 298 aa, Homo sapiens
MFSRAGVAGLSAWTLQPQWIQVRNMATLKDITRRLKSIKNIQKITKSMKMVAAAKYARAERELKPARIYGLGSLALYEKADIKGPEDKKKHLLIGVSSDRGLCGAIHSSIAKQMKSEVATLTAAGKEVMLVGIGDKIRGILYRTHSDQFLVAFKEVGRKPPTFGDASVIALELLNSGYEFDEGSIIFNKFRSVISYKTEEKPIFSLNTVASADSMSIYDDIDADVLQNYQEYNLANIIYYSLKESTTSEQSARMTAMDNASKNASEMIDKLTLTFNRTRQAVITKELIEIISGAAALD

SEQ ID NO: 4413 - protein, 297 aa, Homo sapiens
MFSRAGVAGLSAWTLQPQWIQVRNMATLKDITRRLKSIKNIQKITKSMKMVAAAKYARAERELKPARIYGLGSLALYEKADIKGPEDKKKHLLIGVSSDRGLCGAIHSSIAKQMKSEVATLTAAGKEVMLVGIGDKIRGILYRTHSDQFLVAFKEVGRKPPTFGDASVIALELLNSGYEFDEGSIIFNKFRSVISYKTEEKPIFSLNTVASADSMSIYDDIDADVLQNYQEYNLANIIYYSLKESTTSEQSARMTAMDNASKNASEMIDKLTLTFNRTRQAVITKELIEIISGAAAL

SEQ ID NO: 4414 - protein, 980 aa, Homo sapiens
MATAATSPALKRLDLRDPAALFETHGAEEIRGLERQVRAEIEHKKEELRQMVGERYRDLIEAADTIGQMRRCAVGLVDAVKATDQYCARLRQAGSAAPRPPRAQQPQQPSQEKFYSMAAQIKLLLEIPEKIWSSMEASQCLHATQLYLLCCHLHSLLQLDSSSSRYSPVLSRFPILIRQVAAASHFRSTILHESKMLLKCQGVSDQAVAEALCSIMLLEESSPRQALTDFLLARKATIQKLLNQPHHGAGIKAQICSLVELLATTLKQAHALFYTLPEGLLPDPALPCGLLFSTLETITGQHPAGKGTGVLQEEMKLCSWFKHLPASIVEFQPTLRTLAHPISQEYLKDTLQKWIHMCNEDIKNGITNLLMYVKSMKGLAGIRDAMWELLTNESTNHSWDVLCRRLLEKPLLFWEDMMQQLFLDRLQTLTKEGFDSISSSSKELLVSALQELESSTSNSPSNKHIHFEYNMSLFLWSESPNDLPSDAAWVSVANRGQFASSGLSMKAQAISPCVQNFCSALDSKLKVKLDDLLAYLPSDDSSLPKDVSPTQAKSSAFDRYADAGTVQEMLRTQSVACIKHIVDCIRAELQSIEEGVQGQQDALNSAKLHSVLFMARLCQSLGELCPHLKQCILGKSESSEKPAREFRALRKQGKVKTQEIIPTQAKWQEVKEVLLQQSVMGYQVWSSAVVKVLIHGFTQSLLLDDAGSVLATATSWDELEIQEEAESGSSVTSKIRLPAQPSWYVQSFLFSLCQEINRVGGHALPKVTLQEMLKSCMVQVVAAYEKLSEEKQIKKEGAFPVTQNRALQLLYDLRYLNIVLTAKGDEVKSGRSKPDSRIEKVTDHLEALIDPFDLDVFTPHLNSNLHRLVQRTSVLFGLVTGTENQLAPRSSTFNSQEPHNILPLASSQIRFGLLPLSMTSTRKAKSTRNIETKAQVVPPARSTAGDPTVPGSLFRQLVSEEDNTSAPSLFKLGWLSSMTK

SEQ ID NO: 4415 - protein, 684 aa, Homo sapiens
MSAIPAEESDQLLIRPLGAGQEVGRSCIILEFKGRKIMLDCGIHPGLEGMDALPYIDLIDPAEIDLLLISHFHLDHCGALPWFLQKTSFKGRTFMTHATKAIYRWLLSDYVKVSNISADDMLYTETDLEESMDKIETINFHEVKEVAGIKFWCYHAGHVLGAAMFMIEIAGVKLLYTGDFSRQEDRHLMAAEIPNIKPDILIIESTYGTHIHEKREEREARFCNTVHDIVNRGGRGLIPVFALGRAQELLLILDEYWQNHPELHDIPIYYASSLAKKCMAVYQTYVNAMNDKIRKQININNPFVFKHISNLKSMDHFDDIGPSVVMASPGMMQSGLSRELFESWCTDKRNGVIIAGYCVEGTLAKHIMSEPEEITTMSGQKLPLKMSVDYISFSAHTDYQQTSEFIRALKPPHVILVHGEQNEMARLKAALIREYEDNDEVHIEVHNPRNTEAVTLNFRGEKLAKVMGFLADKKPEQGQRVSGILVKRNFNYHILSPCDLSNYTDLAMSTVKQTQAIPYTGPFNLLCYQLQKLTGDVEELEIQEKPALKVFKNITVIQEPGMVVLEWLANPSNDMYADTVTTVILEVQSNPKIRKGAVQKVSKKLEMHVYSKRLEIMLQDIFGEDCVSVKDDSILSVTVDGKTANLNLETRTVECEEGSEDDESLREMVELAAQRLYEALTPVH

SEQ ID NO: 4416 - protein, 169 aa, Homo sapiens
MCHRKPGTPGVGKTTLGKELASKSGLKYINVGDLAREEQLYDGYDEEYDCPILDEDRVVDELDNQMREGGVIVDYHGCDFFPERWFHIVFVLRTDTNVLYERLETRGYNEKKLTDNIQCEIFQVLYEEATASYKEEIVHQLPSNKPEELENNVDQILKWIEQWIKDHNS

SEQ ID NO: 4417 - protein, 264 aa, Homo sapiens
MESGKTASPKSMPKDAQMMAQILKDMGITEYEPRVINQMLEFAFRYVTTILDDAKIYSSHAKKATVDADDVRLAIQCRADQSFTSPPPRDFLLDIARQRNQTPLPLIKPYSGPRLPPDRYCLTAPNYRLKSLQKKASTSAGRITVPRLSVGSVTSRPSTPTLGTPTPQTMSVSTKVGTPMSLTGQRFTVQMPTSQSPAVKASIPATSAVQNVLINPSLIGSKNILITTNMMSSQNTANESSNALKRKREDDDDDDDDDDDYDNL

SEQ ID NO: 4418 - protein, 264 aa, Homo sapiens; identical to SEQ ID NO: 4417

SEQ ID NO: 4419 - protein, 172 aa, Homo sapiens
MLLPNILLTGTPGVGKTTLGKELASKSGLKYINVGDLAREEQLYDGYDEEYDCPILDEDRVVDELDNQMREGGVIVDYHGCDFFPERWFHIVFVLRTDTNVLYERLETRGYNEKKLTDNIQCEIFQVLYEEATASYKEEIVHQLPSNKPEELENNVDQILKWIEQWIKDHNS

SEQ ID NO: 4420 - protein, 1214 aa, Homo sapiens
MAVRKKDGGPNVKYYEAADTVTQFDNVRLWLGKNYKKYIQAEPPTNKSLSSLVVQLLQFQEEVFGKHVSNAPLTKLPIKCFLDFKAGGSLCHILAAAYKFKSDQGWRRYDFQNPSRMDRNVEMFMTIEKSLVQNNCLSRPNIFLCPEIEPKLLGKLKDIIKRHQGTVTEDKNNASHVVYPVPGNLEEEEWVRPVMKRDKQVLLHWGYYPDSYDTWIPASEIEASVEDAPTPEKPRKVHAKWILDTDTFNEWMNEEDYEVNDDKNPVSRRKKISAKTLTDEVNSPDSDRRDKKGGNYKKRKRSPSPSPTPEAKKKNAKKGPSTPYTKSKRGHREEEQEDLTKDMDEPSPVPNVEEVTLPKTVNTKKDSESAPVKGGTMTDLDEQEDESMETTGKDEDENSTGNKGEQTKNPDLHEDNVTEQTHHIIIPSYAAWFDYNSVHAIERRALPEFFNGKNKSKTPEIYLAYRNFMIDTYRLNPQEYLTSTACRRNLAGDVCAIMRVHAFLEQWGLINYQVDAESRPTPMGPPPTSHFHVLADTPSGLVPLQPKTPQQTSASQQMLNFPDKGKEKPTDMQNFGLRTDMYTKKNVPSKSKAAASATREWTEQETLLLLEALEMYKDDWNKVSEHVGSRTQDECILHFLRLPIEDPYLEDSEASLGPLAYQPIPFSQSGNPVMSTVAFLASVVDPRVASAAAKSALEEFSKMKEEVPTALVEAHVRKVEEAAKVTGKADPAFGLESSGIAGTTSDEPERIEESGNDEARVEGQATDEKKEPKEPREGGGAIEEEAKEKTSEAPKKDEEKGKEGDSEKESEKSDGDPIVDPEKEKEPKEGQEEVLKEVVESEGERKTKVERDIGEGNLSTAAAAALAAAAVKAKHLAAVEERKIKSLVALLVETQMKKLEIKLRHFEELETIMDREREALEYQRQQLLADRQAFHMEQLKYAEMRARQQHFQQMHQQQQQPPPALPPGSQPIPPTGAAGPPAVHGLAVAPASVVPAPAGSGAPPGSLGPSEQIGQAGSTAGPQQQQPAGAPQPGAVPPGVPPPGPHGPSPFPNQQTPPSMMPGAVPGSGHPGVAGNAPLGLPFGMPPPPPPPAPSIIPFGSLADSISINLPAPPNLHGHHHHLPFAPGTLPPPNLPVSMANPLHPNLPATTTMPSSLPLGPGLGSAAAQSPAIVAAVQGNLLPSASPLPDPGTPLPPDPTAPSPGTVTPVPPPQ

SEQ ID NO: 4421 - protein, 1130 aa, Homo sapiens
MAVRKKDGGPNVKYYEAADTVTQFDNVRLWLGKNYKKYIQAEPPTNKSLSSLVVQLLQFQEEVFGKHVSNAPLTKLPIKCFLDFKAGGSLCHILAAAYKFKSDQGWRRYDFQNPSRMDRNVEMFMTIEKSLVQNNCLSRPNIFLCPEIEPKLLGKLKDIIKRHQGTVTEDKNNASHVVYPVPGNLEEEEWVRPVMKRDKQVLLHWGYYPDSYDTWIPASEIEASVEDAPTPEKPRKVHAKWILDTDTFNEWMNEEDYEVNDDKNPVSRRKKISAKTLTDEVNSPDSDRRDKKGGNYKKRKRSPSPSPTPEAKKKNAKKGPSTPYTKSKRGHREEEQEDLTKDMDEPSPVPNVEEVTLPKTVNTKKDSESAPVKGGTMTDLDEQEDESMETTGKDEDENSTGNKGEQTKNPDLHEDNVTEQTHHIIIPSYAAWFDYNSVHAIERRALPEFFNGKNKSKTPEIYLAYRNFMIDTYRLNPQEYLTSTACRRNLAGDVCAIMRVHAFLEQWGLINYQVDAESRPTPMGPPPTSHFHVLADTPSGLVPLQPKTPQGRQVDADTKAGRKGKELDDLVPETAKGKPELQTSASQQMLNFPDKGKEKPTDMQNFGLRTDMYTKKNVPSKSKAAASATREWTEQETLLLLEALEMYKDDWNKVSEHVGSRTQDECILHFLRLPIEDPYLEDSEASLGPLAYQPIPFSQSGNPVMSTVAFLASVVDPRVASAAAKSALEEFSKMKEEVPTALVEAHVRKVEEAAKVTGKADPAFGLESSGIAGTTSDEPERIEESGNDEARVEGQATDEKKEPKEPREGGGAIEEEAKEKTSEAPKKDEEKGKEGDSEKESEKSDGDPIVDPEKEKEPKEGQEEVLKEVVESEGERKTKVERDIGEGNLSTAAAAALAAAAVKAKHLAAVEERKIKSLVALLVETQMKKLEIKLRHFEELETIMDREREALEYQRQQLLADRQAFHMEQLKYAEMRARQQHFQQMHQQQQQPPPALPPGSQPIPPTGAAGPPAVHGLAVAPASVVPAPAGSGAPPGSLGPSEQIGQAGSTAGPQQQQPAGAPQPGAVPPGVPPPGPHGPSPFPNQQTPPSMMPGAVPGSGHPGVADPGTPLPPDPTAPSPGTVTPVPPPQ

SEQ ID NO: 4422 - protein, 400 aa, Homo sapiens
MTFEDVAVEFSQWEWGQLNPAQKDLYREVMLENFRNLAILGLLVSKPYVICQLEEGGEPFMVEREISTGAHSDWKRRSKSKESMPSWGISKEELFQVVSVEKHIQDVLQFSKLKAACGCDGQLEMQQIKQERHLKQMSTIHKSATTLSRDYKWNGFGRSLGLRSVLVNQHSILMGEGSYKCDTEFRQTLGGNNSQRTHPEKKSCKCNECGKSFHFQSELRRHQRCHTGEKPYECSDCGRAFGHISSLIKHQRTHTGEKPYECSECGRAFSQSSSLVLHYRFHTGEKPYKCNECGRAFGHTSSLIKHQRTHTGEKPYECRECGRTFSQSSSLIVHYRFHTGEKPYKCNKCGRAFSQSSSLTQHYRFHTGEKPYKCNECGRAFAHTASLIKHQRSHAGKKTL

SEQ ID NO: 4423 - protein, 892 aa, Homo sapiens
MSERAADDVRGEPRRAAAAAGGAAAAAARQQQQQQQQQQPPPPQPQRQQHPPPPPRRTRPEDGGPGAASTSAAAMATVGERRPLPSPEVMLGQSWNLWVEASKLPGKDGTELDESFKEFGKNREVMGLCREDMPIFGFCPAHDDFYLVVCNDCNQVVKPQAFQSHYERRHSSSSKPPLAVPPTSVFSFFPSLSKSKGGSASGSNRSSSGGVLSASSSSSKLLKSPKEKLQLRGNTRPMHPIQQSRVPHGRIMTPSVKVEKIHPKMDGTLLKSAVGPTCPATVSSLVKPGLNCPSIPKPTLPSPGQILNGKGLPAPPTLEKKPEDNSNNRKFLNKRLSEREFDPDIHCGVIDLDTKKPCTRSLTCKTHSLTQRRAVQGRRKRFDVLLAEHKNKTREKELIRHPDSQQPPQPLRDPHPAPPRTSQEPHQNPHGVIPSESKPFVASKPKPHTPSLPRPPGCPAQQGGSAPIDPPPVHESPHPPLPATEPASRLSSEEGEGDDKEESVEKLDCHYSGHHPQPASFCTFGSRQIGRGYYVFDSRWNRLRCALNLMVEKHLNAQLWKKIPPVPSTTSPISTRIPHRTNSVPTSQCGVSYLAAATVSTSPVLLSSTCISPNSKSVPAHGTTLNAQPAASGAMDPVCSMQSRQVSSSSSSPSTPSGLSSVPSSPMSRKPQKLKSSKSLRPKESSGNSTNCQNASSSTSGGSGKKRKNSSPLLVHSSSSSSSSSSSSHSMESFRKNCVAHSGPPYPSTVTSSHSIGLNCVTNKANAVNVRHDQSGRGPPTGSPAESIKRMSVMVNSSDSTLSLGPFIHQSNELPVNSHGSFSHSHTPLDKLIGKKRKCSPSSSSINNSSSKPTKVAKVPAVNNVHMKHTGTIPGAQGLMNSSLLHQPKARP

SEQ ID NO: 4424 - protein, 752 aa, Homo sapiens
MQFFGRLVNTFSGVTNLFSNPFRVKEVAVADYTSSDRVREEGQLILFQNTPNRTWDCVLVNPRNSQSGFRLFQLELEADALVNFHQYSSQLLPFYESSPQVLHTEVLQHLTDLIRNHPSWSVAHLAVELGIRECFHHSRIISCANCAENEEGCTPLHLACRKGDGEILVELVQYCHTQMDVTDYKGETVFHYAVQGDNSQVLQLLGRNAVAGLNQVNNQGLTPLHLACQLGKQEMVRVLLLCNARCNIMGPNGYPIHSAMKFSQKGCAEMIISMDSSQIHSKDPRYGASPLHWAKNAEMARMLLKRGCNVNSTSSAGNTALHVAVMRNRFDCAIVLLTHGANADARGEHGNTPLHLAMSKDNVEMIKALIVFGAEVDTPNDFGETPTFLASKIGRQLQDLMHISRARKPAFILGSMRDEKRTHDHLLCLDGGGVKGLIIIQLLIAIEKASGVATKDLFDWVAGTSTGGILALAILHSKSMAYMRGMYFRMKDEVFRGSRPYESGPLEEFLKREFGEHTKMTDVRKPKVMLTGTLSDRQPAELHLFRNYDAPETVREPRFNQNVNLRPPAQPSDQLVWRAARSSGAAPTYFRPNGRFLDGGLLANNPTLDAMTEIHEYNQDLIRKGQANKVKKLSIVVSLGTGRSPQVPVTCVDVFRPSNPWELAKTVFGAKELGKMVVDCCTDPDGRAVDRARAWCEMVGIQYFRLNPQLGTDIMLDEVSDTVLVNALWETEVYIYEHREEFQKLIQLLLSP

SEQ ID NO: 4425 - protein, 806 aa, Homo sapiens
MQFFGRLVNTFSGVTNLFSNPFRVKEVAVADYTSSDRVREEGQLILFQNTPNRTWDCVLVNPRNSQSGFRLFQLELEADALVNFHQYSSQLLPFYESSPQVLHTEVLQHLTDLIRNHPSWSVAHLAVELGIRECFHHSRIISCANCAENEEGCTPLHLACRKGDGEILVELVQYCHTQMDVTDYKGETVFHYAVQGDNSQVLQLLGRNAVAGLNQVNNQGLTPLHLACQLGKQEMVRVLLLCNARCNIMGPNGYPIHSAMKFSQKGCAEMIISMDSSQIHSKDPRYGASPLHWAKNAEMARMLLKRGCNVNSTSSAGNTALHVAVMRNRFDCAIVLLTHGANADARGEHGNTPLHLAMSKDNVEMIKALIVFGAEVDTPNDFGETPTFLASKIGRLVTRKAILTLLRTVGAEYCFPPIHGVPAEQGSAAPHHPFSLERAQPPPISLNNLELQDLMHISRARKPAFILGSMRDEKRTHDHLLCLDGGGVKGLIIIQLLIAIEKASGVATKDLFDWVAGTSTGGILALAILHSKSMAYMRGMYFRMKDEVFRGSRPYESGPLEEFLKREFGEHTKMTDVRKPKVMLTGTLSDRQPAELHLFRNYDAPETVREPRFNQNVNLRPPAQPSDQLVWRAARSSGAAPTYFRPNGRFLDGGLLANNPTLDAMTEIHEYNQDLIRKGQANKVKKLSIVVSLGTGRSPQVPVTCVDVFRPSNPWELAKTVFGAKELGKMVVDCCTDPDGRAVDRARAWCEMVGIQYFRLNPQLGTDIMLDEVSDTVLVNALWETEVYIYEHREEFQKLIQLLLSP

SEQ ID NO: 4426 - protein, 2752 aa, Homo sapiens
MYNGIGLPTPRGSGTNGYVQRNLSLVRGRRGERPDYKGEEELRRLEAALVKRPNPDILDHERKRRVELRCLELEEMMEEQGYEEQQIQEKVATFRLMLLEKDVNPGGKEETPGQRPAVTETHQLAELNEKKNERLRAAFGISDSYVDGSSFDPQRRAREAKQPAPEPPKPYSLVRESSSSRSPTPKQKKKKKKKDRGRRSESSSPRRERKKSSKKKKHRSESESKKRKHRSPTPKSKRKSKDKKRKRSRSTTPAPKSRRAHRSTSADSASSSDTSRSRSRSAAAKTHTTALAGRSPSPASGRRGEGDAPFSEPGTTSTQRPSSPETATKQPSSPYEDKDKDKKEKSATRPSPSPERSSTGPEPPAPTPLLAERHGGSPQPLATTPLSQEPVNPPSEASPTRDRSPPKSPEKLPQSSSSESSPPSPQPTKVSRHASSSPESPKPAPAPGSHREISSSPTSKNRSHGRAKRDKSHSHTPSRRMGRSRSPATAKRGRSRSRTPTKRGHSRSRSPQWRRSRSAQRWGRSRSPQRRGRSRSPQRPGWSRSRNTQRRGRSRSARRGRSHSRSPATRGRSRSRTPARRGRSRSRTPARRRSRSRTPTRRRSRSRTPARRGRSRSRTPARRRSRTRSPVRRRSRSRSPARRSGRSRSRTPARRGRSRSRTPARRGRSRSRTPARRSGRSRSRTPARRGRSRSRTPRRGRSRSRSLVRRGRSHSRTPQRRGRSGSSSERKNKSRTSQRRSRSNSSPEMKKSRISSRRSRSLSSPRSKAKSRLSLRRSLSGSSPCPKQKSQTPPRRSRSGSSQPKAKSRTPPRRSRSSSSPPPKQKSKTPSRQSHSSSSPHPKVKSGTPPRQGSITSPQANEQSVTPQRRSCFESSPDPELKSRTPSRHSCSGSSPPRVKSSTPPRQSPSRSSSPQPKVKAIISPRQRSHSGSSSPSPSRVTSRTTPRRSRSVSPCSNVESRLLPRYSHSGSSSPDTKVKPETPPRQSHSGSISPYPKVKAQTPPGPSLSGSKSPCPQEKSKDSLVQSCPGSLSLCAGVKSSTPPGESYFGVSSLQLKGQSQTSPDHRSDTSSPEVRQSHSESPSLQSKSQTSPKGGRSRSSSPVTELASRSPIRQDRGEFSASPMLKSGMSPEQSRFQSDSSSYPTVDSNSLLGQSRLETAESKEKMALPPQEDATASPPRQKDKFSPFPVQDRPESSLVFKDTLRTPPRERSGAGSSPETKEQNSALPTSSQDEELMEVVEKSEEPAGQILSHLSSELKEMSTSNFESSPEVEERPAVSLTLDQSQSQASLEAVEVPSMASSWGGPHFSPEHKELSNSPLRENSFGSPLEFRNSGPLGTEMNTGFSSEVKEDLNGPFLNQLETDPSLDMKEQSTRSSGHSSSELSPDAVEKAGMSSNQSISSPVLDAVPRTPSRERSSSASSPEMKDGLPRTPSRRSRSGSSPGLRDGSGTPSRHSLSGSSPGMKDIPRTPFRGRSECDSSPEPKALPQTPRPRSRSPSSPELNNKCLTPQRERSGSESSVDQKTVARTPLGQRSRSGSSQELDVKPSASPQERSESDSSPDSKAKTRTPLRQRSRSGSSPEVDSKSRLSPRRSRSGSSPEVKDKPRAAPRAQSGSDSSPEPKAPAPRALPRRSRSGSSSKGRGPSPEGSSSTESSPEHPPKSRTARRGSRSSPEPKTKSRTPPRRRSSRSSPELTRKARLSRRSRSASSSPETRSRTPPRHRRSPSVSSPEPAEKSRSSRRRRSASSPRTKTTSRRGRSPSPKPRGLQRSRSRSRREKTRTTRRRDRSGSSQSTSRRRQRSRSRSRVTRRRRGGSGYHSRSPARQESSRTSSRRRRGRSRTPPTSRKRSRSRTSPAPWKRSRSRASPATHRRSRSRTPLISRRRSRSRTSPVSRRRSRSRTSVTRRRSRSRASPVSRRRSRSRTPPVTRRRSRSRTPTTRRRSRSRTPPVTRRRSRSRTPPVTRRRSRSRTSPITRRRSRSRTSPVTRRRSRSRTSPVTRRRSRSRTSPVTRRRSRSRTPPAIRRRSRSRTPLLPRKRSRSRSPLAIRRRSRSRTPRTARGKRSLTRSPPAIRRRSASGSSSDRSRSATPPATRNHSGSRTPPVALNSSRMSCFSRPSMSPTPLDRCRSPGMLEPLGSSRTPMSVLQQAGGSMMDGPGPRIPDHQRTSVPENHAQSRIALALTAISLGTARPPPSMSAAGLAARMSQVPAPVPLMSLRTAPAANLASRIPAASAAAMNLASARTPAIPTAVNLADSRTPAAAAAMNLASPRTAVAPSAVNLADPRTPTAPAVNLAGARTPAALAALSLTGSGTPPTAANYPSSSRTPQAPASANLVGPRSAHATAPVNIAGSRTAAALAPASLTSARMAPALSGANLTSPRVPLSAYERVSGRTSPPLLDRARSRTPPSAPSQSRMTSERAPSPSSRMGQAPSQSLLPPAQDQPRSPVPSAFSDQSRCLIAQTTPVAGSQSLSSGAVATTTSSAGDHNGMLSVPAPGVPHSDVGEPPASTGAQQPSALAALQPAKERRSSSSSSSSSSSSSSSSSSSSSSSSSGSSSSDSEGSSLPVQPEVALKRVPSPTPAPKEAVREGRPPEPTPAKRKRRSSSSSSSSSSSSSSSSSSSSSSSSSSSSSSSSSSSSSSSSSSPSPAKPGPQALPKPASPKKPPPGERRSRSPRKPIDSLRDSRSLSYSPVERRRPSPQPSPRDQQSSSSERGSRRGQRGDSRSPSHKRRRETPSPRPMRHRSSRSP

SEQ ID NO: 4427 - protein, 3801 aa, Homo sapiens
MSTDSNSLAREFLTDVNRLCNAVVQRVEAREEEEEETHMATLGQYLVHGRGFLLLTKLNSIIDQALTCREELLTLLLSLLPLVWKIPVQEEKATDFNLPLSADIILTKEKNSSSQRSTQEKLHLEGSALSSQVSAKVNVFRKSRRQRKITHRYSVRDARKTQLSTSDSEANSDEKGIAMNKHRRPHLLHHFLTSFPKQDHPKAKLDRLATKEQTPPDAMALENSREIIPRQGSNTDILSEPAALSVISNMNNSPFDLCHVLLSLLEKVCKFDVTLNHNSPLAASVVPTLTEFLAGFGDCCSLSDNLESRVVSAGWTEEPVALIQRMLFRTVLHLLSVDVSTAEMMPENLRKNLTELLRAALKIRICLEKQPDPFAPRQKKTLQEVQEDFVFSKYRHRALLLPELLEGVLQILICCLQSAASNPFYFSQAMDLVQEFIQHHGFNLFETAVLQMEWLVLRDGVPPEASEHLKALINSVMKIMSTVKKVKSEQLHHSMCTRKRHRRCEYSHFMHHHRDLSGLLVSAFKNQVSKNPFEETADGDVYYPERCCCIAVCAHQCLRLLQQASLSSTCVQILSGVHNIGICCCMDPKSVIIPLLHAFKLPALKNFQQHILNILNKLILDQLGGAEISPKIKKAACNICTVDSDQLAQLEETLQGNLCDAELSSSLSSPSYRFQGILPSSGSEDLLWKWDALKAYQNFVFEEDRLHSIQIANHICNLIQKGNIVVQWKLYNYIFNPVLQRGVELAHHCQHLSVTSAQSHVCSHHNQCLPQDVLQIYVKTLPILLKSRVIRDLFLSCNGVSQIIELNCLNGIRSHSLKAFETLIISLGEQQKDASVPDIDGIDIEQKELSSVHVGTSFHHQQAYSDSPQSLSKFYAGLKEAYPKRRKTVNQDVHINTINLFLCVAFLCVSKEAESDRESANDSEDTSGYDSTASEPLSHMLPCISLESLVLPSPEHMHQAADIWSMCRWIYMLSSVFQKQFYRLGGFRVCHKLIFMIIQKLFRSHKEEQGKKEGDTSVNENQDLNRISQPKRTMKEDLLSLAIKSDPIPSELGSLKKSADSLGKLELQHISSINVEEVSATEAAPEEAKLFTSQESETSLQSIRLLEALLAICLHGARTSQQKMELELPNQNLSVESILFEMRDHLSQSKVIETQLAKPLFDALLRVALGNYSADFEHNDAMTEKSHQSAEELSSQPGDFSEEAEDSQCCSFKLLVEEEGYEADSESNPEDGETQDDGVDLKSETEGFSASSSPNDLLENLTQGEIIYPEICMLELNLLSASKAKLDVLAHVFESFLKIIRQKEKNVFLLMQQGTVKNLLGGFLSILTQDDSDFQACQRVLVDLLVSLMSSRTCSEELTLLLRIFLEKSPCTKILLLGILKIIESDTTMSPSQYLTFPLLHAPNLSNGVSSQKYPGILNSKAMGLLRRARVSRSKKEADRESFPHRLLSSWHIAPVHLPLLGQNCWPHLSEGFSVSLWFNVECIHEAESTTEKGKKIKKRNKSLILPDSSFDGTESDRPEGAEYINPGERLIEEGCIHIISLGSKALMIQVWADPHNATLIFRVCMDSNDDMKAVLLAQVESQENIFLPSKWQHLVLTYLQQPQGKRRIHGKISIWVSGQRKPDVTLDFMLPRKTSLSSDSNKTFCMIGHCLSSQEEFLQLAGKWDLGNLLLFNGAKVGSQEAFYLYACGPNHTSVMPCKYGKPVNDYSKYINKEILRCEQIRELFMTKKDVDIGLLIESLSVVYTTYCPAQYTIYEPVIRLKGQMKTQLSQRPFSSKEVQSILLEPHHLKNLQPTEYKTIQGILHEIGGTGIFVFLFARVVELSSCEETQALALRVILSLIKYNQQRVHELENCNGLSMIHQVLIKQKCIVGFYILKTLLEGCCGEDIIYMNENGEFKLDVDSNAIIQDVKLLEELLLDWKIWSKAEQGVWETLLAALEVLIRADHHQQMFNIKQLLKAQVVHHFLLTCQVLQEYKEGQLTPMPREVCRSFVKIIAEVLGSPPDLELLTIIFNFLLAVHPPTNTYVCHNPTNFYFSLHIDGKIFQEKVRSIMYLRHSSSGGRSLMSPGFMVISPSGFTASPYEGENSSNIIPQQMAAHMLRSRSLPAFPTSSLLTQSQKLTGSLGCSIDRLQNIADTYVATQSKKQNSLGSSDTLKKGKEDAFISSCESAKTVCEMEAVLSAQVSVSDVPKGVLGFPVVKADHKQLGAEPRSEDDSPGDESCPRRPDYLKGLASFQRSHSTIASLGLAFPSQNGSAAVGRWPSLVDRNTDDWENFAYSLGYEPNYNRTASAHSVTEDCLVPICCGLYELLSGVLLILPDVLLEDVMDKLIQADTLLVLVNHPSPAIQQGVIKLLDAYFARASKEQKDKFLKNRGFSLLANQLYLHRGTQELLECFIEMFFGRHIGLDEEFDLEDVRNMGLFQKWSVIPILGLIETSLYDNILLHNALLLLLQILNSCSKVADMLLDNGLLYVLCNTVAALNGLEKNIPMSEYKLLACDIQQLFIAVTIHACSSSGSQYFRVIEDLIVMLGYLQNSKNKRTQNMAVALQLRVLQAAMEFIRTTANHDSENLTDSLQSPSAPHHAVVQKRKSIAGPRKFPLAQTESLLMKMRSVANDELHVMMQRRMSQENPSQATETELAQRLQRLTVLAVNRIIYQEFNSDIIDILRTPENVTQSKTSVFQTEISEENIHHEQSSVFNPFQKEIFTYLVEGFKVSIGSSKASGSKQQWTKILWSCKETFRMQLGRLLVHILSPAHAAQERKQIFEIVHEPNHQEILRDCLSPSLQHGAKLVLYLSELIHNHQGELTEEELGTAELLMNALKLCGHKCIPPSASTKADLIKMIKEEQKKYETEEGVNKAAWQKTVNNNQQSLFQRLDSKSKDISKIAADITQAVSLSQGNERKKVIQHIRGMYKVDLSASRHWQELIQQLTHDRAVWYDPIYYPTSWQLDPTEGPNRERRRLQRCYLTIPNKYLLRDRQKSEDVVKPPLSYLFEDKTHSSFSSTVKDKAASESIRVNRRCISVAPSRETAGELLLGKCGMYFVEDNASDTVESSSLQGELEPASFSWTYEEIKEVHKRWWQLRDNAVEIFLTNGRTLLLAFDNTKVRDDVYHNILTNNLPNLLEYGNITALTNLWYTGQITNFEYLTHLNKHAGRSFNDLMQYPVFPFILADYVSETLDLNDLLIYRNLSKPIAVQYKEKEDRYVDTYKYLEEEYRKGAREDDPMPPVQPYHYGSHYSNSGTVLHFLVRMPPFTKMFLAYQDQSFDIPDRTFHSTNTTWRLSSFESMTDVKELIPEFFYLPEFLVNREGFDFGVRQNGERVNHVNLPPWARNDPRLFILIHRQALESDYVSQNICQWIDLVFGYKQKGKASVQAINVFHPATYFGMDVSAVEDPVQRRALETMIKTYGQTPRQLFHMAHVSRPGAKLNIEGELPAAVGLLVQFAFRETREQVKEITYPSPLSWIKGLKWGEYVGSPSAPVPVVCFSQPHGERFGSLQALPTRAICGLSRNFCLLMTYSKEQGVRSMNSTDIQWSAILSWGYADNILRLKSKQSEPPVNFIQSSQQYQVTSCAWVPDSCQLFTGSKCGVITAYTNRFTSSTPSEIEMETQIHLYGHTEEITSLFVCKPYSILISVSRDGTCIIWDLNRLCYVQSLAGHKSPVTAVSASETSGDIATVCDSAGGGSDLRLWTVNGDLVGHVHCREIICSVAFSNQPEGVSINVIAGGLENGIVRLWSTWDLKPVREITFPKSNKPIISLTFSCDGHHLYTANSDGTVIAWCRKDQQRLKQPMFYSFLSSYAAG

SEQ ID NO: 4428 - protein, 2001 aa, Homo sapiens
MSTDSNSLAREFLTDVNRLCNAVVQRVEAREEEEEETHMATLGQYLVHGRGFLLLTKLNSIIDQALTCREELLTLLLSLLPLVWKIPVQEEKATDFNLPLSADIILTKEKNSSSQRSTQEKLHLEGSALSSQVSAKVNVFRKSRRQRKITHRYSVRDARKTQLSTSDSEANSDEKGIAMNKHRRPHLLHHFLTSFPKQDHPKAKLDRLATKEQTPPDAMALENSREIIPRQGSNTDILSEPAALSVISNMNNSPFDLCHVLLSLLEKVCKFDVTLNHNSPLAASVVPTLTEFLAGFGDCCSLSDNLESRVVSAGWTEEPVALIQRMLFRTVLHLLSVDVSTAEMMPENLRKNLTELLRAALKIRICLEKQPDPFAPRQKKTLQEVQEDFVFSKYRHRALLLPELLEGVLQILICCLQSAASNPFYFSQAMDLVQEFIQHHGFNLFETAVLQMEWLVLRDGVPPEASEHLKALINSVMKIMSTVKKVKSEQLHHSMCTRKRHRRCEYSHFMHHHRDLSGLLVSAFKNQVSKNPFEETADGDVYYPERCCCIAVCAHQCLRLLQQASLSSTCVQILSGVHNIGICCCMDPKSVIIPLLHAFKLPALKNFQQHILNILNKLILDQLGGAEISPKIKKAACNICTVDSDQLAQLEETLQGNLCDAELSSSLSSPSYRFQGILPSSGSEDLLWKWDALKAYQNFVFEEDRLHSIQIANHICNLIQKGNIVVQWKLYNYIFNPVLQRGVELAHHCQHLSVTSAQSHVCSHHNQCLPQDVLQIYVKTLPILLKSRVIRDLFLSCNGVSQIIELNCLNGIRSHSLKAFETLIISLGEQQKDASVPDIDGIDIEQKELSSVHVGTSFHHQQAYSDSPQSLSKFYAGLKEAYPKRRKTVNQDVHINTINLFLCVAFLCVSKEAESDRESANDSEDTSGYDSTASEPLSHMLPCISLESLVLPSPEHMHQAADIWSMCRWIYMLSSVFQKQFYRLGGFRVCHKLIFMIIQKLFRSHKEEQGKKEGDTSVNENQDLNRISQPKRTMKEDLLSLAIKSDPIPSELGSLKKSADSLGKLELQHISSINVEEVSATEAAPEEAKLFTSQESETSLQSIRLLEALLAICLHGARTSQQKMELELPNQNLSVESILFEMRDHLSQSKVIETQLAKPLFDALLRVALGNYSADFEHNDAMTEKSHQSAEELSSQPGDFSEEAEDSQCCSFKLLVEEEGYEADSESNPEDGETQDDGVDLKSETEGFSASSSPNDLLENLTQGEIIYPEICMLELNLLSASKAKLDVLAHVFESFLKIIRQKEKNVFLLMQQGTVKNLLGGFLSILTQDDSDFQACQRVLVDLLVSLMSSRTCSEELTLLLRIFLEKSPCTKILLLGILKIIESDTTMSPSQYLTFPLLHAPNLSNGVSSQKYPGILNSKAMGLLRRARVSRSKKEADRESFPHRLLSSWHIAPVHLPLLGQNCWPHLSEGFSVSLWFNVECIHEAESTTEKGKKIKKRNKSLILPDSSFDGTESDRPEGAEYINPGERLIEEGCIHIISLGSKALMIQVWADPHNATLIFRVCMDSNDDMKAVLLAQVESQENIFLPSKWQHLVLTYLQQPQGKRRIHGKISIWVSGQRKPDVTLDFMLPRKTSLSSDSNKTFCMIGHCLSSQEEFLQLAGKWDLGNLLLFNGAKVGSQEAFYLYACGPNHTSVMPCKYGKPVNDYSKYINKEILRCEQIRELFMTKKDVDIGLLIESLSVVYTTYCPAQYTIYEPVIRLKGQMKTQLSQRPFSSKEVQSILLEPHHLKNLQPTEYKTIQGILHEIGGTGIFVFLFARVVELSSCEETQALALRVILSLIKYNQQRVHELENCNGLSMIHQVLIKQKCIVGFYILKTLLEGCCGEDIIYMNENGEFKLDVDSNAIIQDVKLLEELLLDWKIWSKAEQGVWETLLAALEVLIRADHHQQMFNIKQLLKAQVVHHFLLTCQVLQEYKEGQLTPMPREMARSFRRKCGQSCT

SEQ ID NO: 4429 - protein, 736 aa, Homo sapiens
MASIMEGPLSKWTNVMKGWQYRWFVLDYNAGLLSYYTSKDKMMRGSRRGCVRLRGAVIGIDDEDDSTFTITVDQKTFHFQARDADEREKWIHALEETILRHTLQLQGLDSGFVPSVQDFDKKLTEADAYLQILIEQLKLFDDKLQNCKEDEQRKKIETLKETTNSMVESIKHCIVLLQIAKDQSNAEKHADGMISTINPVDAIYQPSPLEPVISTMPSQTVLPPEPVQLCKSEQRPSSLPVGPVLATLGHHQTPTPNSTGSGHSPPSSSLTSPSHVNLSPNTVPEFSYSSSEDEFYDADEFHQSGSSPKRLIDSSGSASVLTHSSSGNSLKRPDTTESLNSSLSNGTSDADLFDSHDDRDDDAEAGSVEEHKSVIMHLLSQVRLGMDLTKVVLPTFILERRSLLEMYADFFAHPDLFVSISDQKDPKDRMVQVVKWYLSAFHAGRKGSVAKKPYNPILGEIFQCHWTLPNDTEENTELVSEGPVPWVSKNSVTFVAEQVSHHPPISAFYAECFNKKIQFNAHIWTKSKFLGMSIGVHNIGQGCVSCLDYDEHYILTFPNGYGRSILTVPWVELGGECNINCSKTGYSANIIFHTKPFYGGKKHRITAEIFSPNDKKSFCSIEGEWNGVMYAKYATGENTVFVDTKKLPIIKKKVRKLEDQNEYESRSLWKDVTFNLKIRDIDAATEAKHRLEERQRAEARERKEKEIQWETRLFHEDGECWVYDEPLLKRLGAAKH

SEQ ID NO: 4430 - protein, 558 aa, Homo sapiens
MVESIKHCIVLLQIAKSTINPVDAIYQPSPLEPVISTMPSQTVLPPEPVQLCKSEQRPSSLPVGPVLATLGHHQTPTPNSTGSGHSPPSSSLTSPSHVNLSPNTVPEFSYSSSEDEFYDADEFHQSGSSPKRLIDSSGSASVLTHSSSGNSLKRPDTTESLNSSLSNGTSDADLFDSHDDRDDDAEAGSVEEHKSVIMHLLSQVRLGMDLTKVVLPTFILERRSLLEMYADFFAHPDLFVSISDQKDPKDRMVQVVKWYLSAFHAGRKGSVAKKPYNPILGEIFQCHWTLPNDTEENTELVSEGPVPWVSKNSVTFVAEQVSHHPPISAFYAECFNKKIQFNAHIWTKSKFLGMSIGVHNIGQGCVSCLDYDEHYILTFPNGYGRSILTVPWVELGGECNINCSKTGYSANIIFHTKPFYGGKKHRITAEIFSPNDKKSFCSIEGEWNGVMYAKYATGENTVFVDTKKLPIIKKKVRKLEDQNEYESRSLWKDVTFNLKIRDIDAATEAKHRLEERQRAEARERKEKEIQWETRLFHEDGECWVYDEPLLKRLGAAKH

SEQ ID NO: 4431 - protein, 558 aa, Homo sapiens; identical to SEQ ID NO: 4430

SEQ ID NO: 4432 - protein, 571 aa, Homo sapiens
MVESIKHCIVLLQIAKDQSNAEKHADGMISTINPVDAIYQPSPLEPVISTMPSQTVLPPEPVQLCKSEQRPSSLPVGPVLATLGHHQTPTPNSTGSGHSPPSSSLTSPSHVNLSPNTVPEFSYSSSEDEFYDADEFHQSGSSPKRLIDSSGSASVLTHSSSGNSLKRPDTTESLNSSLSNGTSDADLFDSHDDRDDDAEAGSVEEHKSVIMHLLSQVRLGMDLTKVVLPTFILERRSLLEMYADFFAHPDLFVSISDQKDPKDRMVQVVKWYLSAFHAGRKGSVAKKPYNPILGEIFQCHWTLPNDTEENTELVSEGPVPWVSKNSVTFVAEQVSHHPPISAFYAECFNKKIQFNAHIWTKSKFLGMSIGVHNIGQGCVSCLDYDEHYILTFPNGYGRSILTVPWVELGGECNINCSKTGYSANIIFHTKPFYGGKKHRITAEIFSPNDKKSFCSIEGEWNGVMYAKYATGENTVFVDTKKLPIIKKKVRKLEDQNEYESRSLWKDVTFNLKIRDIDAATEAKHRLEERQRAEARERKEKEIQWETRLFHEDGECWVYDEPLLKRLGAAKH

SEQ ID NO: 4433 - protein, 626 aa, Homo sapiens
MAFLLATCGGLDSGFVPSVQDFDKKLTEADAYLQILIEQLKLFDDKLQNCKEDEQRKKIETLKETTNSMVESIKHCIVLLQIAKSTINPVDAIYQPSPLEPVISTMPSQTVLPPEPVQLCKSEQRPSSLPVGPVLATLGHHQTPTPNSTGSGHSPPSSSLTSPSHVNLSPNTVPEFSYSSSEDEFYDADEFHQSGSSPKRLIDSSGSASVLTHSSSGNSLKRPDTTESLNSSLSNGTSDADLFDSHDDRDDDAEAGSVEEHKSVIMHLLSQVRLGMDLTKVVLPTFILERRSLLEMYADFFAHPDLFVSISDQKDPKDRMVQVVKWYLSAFHAGRKGSVAKKPYNPILGEIFQCHWTLPNDTEENTELVSEGPVPWVSKNSVTFVAEQVSHHPPISAFYAECFNKKIQFNAHIWTKSKFLGMSIGVHNIGQGCVSCLDYDEHYILTFPNGYGRSILTVPWVELGGECNINCSKTGYSANIIFHTKPFYGGKKHRITAEIFSPNDKKSFCSIEGEWNGVMYAKYATGENTVFVDTKKLPIIKKKVRKLEDQNEYESRSLWKDVTFNLKIRDIDAATEAKHRLEERQRAEARERKEKEIQWETRLFHEDGECWVYDEPLLKRLGAAKH

SEQ ID NO: 4434 - protein, 723 aa, Homo sapiens
MASIMEGPLSKWTNVMKGWQYRWFVLDYNAGLLSYYTSKDKMMRGSRRGCVRLRGAVIGIDDEDDSTFTITVDQKTFHFQARDADEREKWIHALEETILRHTLQLQGLDSGFVPSVQDFDKKLTEADAYLQILIEQLKLFDDKLQNCKEDEQRKKIETLKETTNSMVESIKHCIVLLQIAKSTINPVDAIYQPSPLEPVISTMPSQTVLPPEPVQLCKSEQRPSSLPVGPVLATLGHHQTPTPNSTGSGHSPPSSSLTSPSHVNLSPNTVPEFSYSSSEDEFYDADEFHQSGSSPKRLIDSSGSASVLTHSSSGNSLKRPDTTESLNSSLSNGTSDADLFDSHDDRDDDAEAGSVEEHKSVIMHLLSQVRLGMDLTKVVLPTFILERRSLLEMYADFFAHPDLFVSISDQKDPKDRMVQVVKWYLSAFHAGRKGSVAKKPYNPILGEIFQCHWTLPNDTEENTELVSEGPVPWVSKNSVTFVAEQVSHHPPISAFYAECFNKKIQFNAHIWTKSKFLGMSIGVHNIGQGCVSCLDYDEHYILTFPNGYGRSILTVPWVELGGECNINCSKTGYSANIIFHTKPFYGGKKHRITAEIFSPNDKKSFCSIEGEWNGVMYAKYATGENTVFVDTKKLPIIKKKVRKLEDQNEYESRSLWKDVTFNLKIRDIDAATEAKHRLEERQRAEARERKEKEIQWETRLFHEDGECWVYDEPLLKRLGAAKH

SEQ ID NO: 4435 - protein, 746 aa, Homo sapiens
MASIMEGPLSKWTNVMKGWQYRWFVLDYNAGLLSYYTSKDKMMRGSRRGCVRLRGAVIGIDDEDDSTFTITVDQKTFHFQARDADEREKWIHALEETILRHTLQLQISTTLAFFQSSGISPVLEFSKIIGLDSGFVPSVQDFDKKLTEADAYLQILIEQLKLFDDKLQNCKEDEQRKKIETLKETTNSMVESIKHCIVLLQIAKSTINPVDAIYQPSPLEPVISTMPSQTVLPPEPVQLCKSEQRPSSLPVGPVLATLGHHQTPTPNSTGSGHSPPSSSLTSPSHVNLSPNTVPEFSYSSSEDEFYDADEFHQSGSSPKRLIDSSGSASVLTHSSSGNSLKRPDTTESLNSSLSNGTSDADLFDSHDDRDDDAEAGSVEEHKSVIMHLLSQVRLGMDLTKVVLPTFILERRSLLEMYADFFAHPDLFVSISDQKDPKDRMVQVVKWYLSAFHAGRKGSVAKKPYNPILGEIFQCHWTLPNDTEENTELVSEGPVPWVSKNSVTFVAEQVSHHPPISAFYAECFNKKIQFNAHIWTKSKFLGMSIGVHNIGQGCVSCLDYDEHYILTFPNGYGRSILTVPWVELGGECNINCSKTGYSANIIFHTKPFYGGKKHRITAEIFSPNDKKSFCSIEGEWNGVMYAKYATGENTVFVDTKKLPIIKKKVRKLEDQNEYESRSLWKDVTFNLKIRDIDAATEAKHRLEERQRAEARERKEKEIQWETRLFHEDGECWVYDEPLLKRLGAAKH

SEQ ID NO: 4436 - protein, 258 aa, Homo sapiens
MWSSVGSHVGPGPVGVAVAIMADPDPRYPRSSIEDDFNYGSSVASATVHIRMAFLRKVYSILSLQVLLTTVTSTVFLYFESVRTFVHESPALILLFALGSLGLIFALTLNRHKYPLNLYLLFGFTLLEALTVAVVVTFYDVYIILQAFILTTTVFFGLTVYTLQSKKDFSKFGAGLFALLWILCLSGFLKFFFYSEIMELVLAAAGALLFCGFIIYDTHSLMHKLSPEEYVLAAISLYLDIINLFLHLLRFLEAVNKK

SEQ ID NO: 4437 - protein, 607 aa, Homo sapiens
MADNLSDTLKKLKITAVDKTEDSLEGCLDCLLQALAQNNTETSEKIQASGILQLFATLLTPQSSCKAKVANIIAEVAKNEFMRIPCVDAGLISPLVQLLNSKDQEVLLQTGRALGNICYDSHEGRSAVDQAGGAQIVIDHLRSLCSITDPANEKLLTVFCGMLMNYSNENDSLQAQLINMGVIPTLVKLLGIHCQNAALTEMCLVAFGNLAELESSKEQFASTNIAEELVKLFKKQIEHDKREMIFEVLAPLAENDAIKLQLVEAGLVECLLEIVQQKVDSDKEDDITELKTGSDLMVLLLLGDESMQKLFEGGKGSVFQRVLSWIPSNNHQLQLAGALAIANFARNDANCIHMVDNGIVEKLMDLLDRHVEDGNVTVQHAALSALRNLAIPVINKAKMLSAGVTEAVLKFLKSEMPPVQFKLLGTLRMLIDAQEAAEQLGKNVKLVERLVEWCEAKDHAGVMGESNRLLSALIRHSKSKDVIKTIVQSGGIKHLVTMATSEHVIMQNEALVALALIAALELGTAEKDLESAKLVQILHRLLADERSAPEIKYNSMVLICALMGSECLHKEVQDLAFLDVVSKLRSHENKSVAQQASLTEQRLTVES

SEQ ID NO: 4438 - protein, 677 aa, Homo sapiens
MDDPDCDSTWEEDEEDAEDAEDEDCEDGEAAGARDADAGDEDEESEEPRAARPSSFQSRMTGSRNWRATRDMCRYRHNYPDLVERDCNGDTPNLSFYRNEIRFLPNGCFIEDILQNWTDNYDLLEDNHSYIQWLFPLREPGVNWHAKPLTLREVEVFKSSQEIQERLVRAYELMLGFYGIRLEDRGTGTVGRAQNYQKRFQNLNWRSHNNLRITRILKSLGELGLEHFQAPLVRFFLEETLVRRELPGVRQSALDYFMFAVRCRHQRRQLVHFAWEHFRPRCKFVWGPQDKLRRFKPSSLPHPLEGSRKVEEEGSPGDPDHEASTQGRTCGPEHSKGGGRVDEGPQPRSVEPQDAGPLERSQGDEAGGHGEDRPEPLSPKESKKRKLELSRREQPPTEPGPQSASEVEKIALNLEGCALSQGSLRTGTQEVGGQDPGEAVQPCRQPLGARVADKVRKRRKVDEGAGDSAAVASGGAQTLALAGSPAPSGHPKAGHSENGVEEDTEGRTGPKEGTPGSPSETPGPSPAGPAGDEPAESPSETPGPRPAGPAGDEPAESPSETPGPRPAGPAGDEPAESPSETPGPSPAGPTRDEPAESPSETPGPRPAGPAGDEPAESPSETPGPRPAGPAGDEPAESPSETPGPSPAGPTRDEPAKAGEAAELQDAEVESSAKSGKP

SEQ ID NO: 4439 - protein, 947 aa, Homo sapiens
MAVMEMACPGAPGSAVGQQKELPKPKEKTPPLGKKQSSVYKLEAVEKSPVFCGKWEILNDVITKGTAKEGSEAGPAAISIIAQAECENSQEFSPTFSERIFIAGSKQYSQSESLDQIPNNVAHATEGKMARVCWKGKRRSKARKKRKKKSSKSLAHAGVALAKPLPRTPEQESCTIPVQEDESPLGAPYVRNTPQFTKPLKEPGLGQLCFKQLGEGLRPALPRSELHKLISPLQCLNHVWKLHHPQDGGPLPLPTHPFPYSRLPHPFPFHPLQPWKPHPLESFLGKLACVDSQKPLPDPHLSKLACVDSPKPLPGPHLEPSCLSRGAHEKFSVEEYLVHALQGSVSSSQAHSLTSLAKTWAARGSRSREPSPKTEDNEGVLLTEKLKPVDYEYREEVHWATHQLRLGRGSFGEVHRMEDKQTGFQCAVKKVRLEVFRAEELMACAGLTSPRIVPLYGAVREGPWVNIFMELLEGGSLGQLVKEQGCLPEDRALYYLGQALEGLEYLHSRRILHGDVKADNVLLSSDGSHAALCDFGHAVCLQPDGLGKSLLTGDYIPGTETHMAPEVVLGRSCDAKVDVWSSCCMMLHMLNGCHPWTQFFRGPLCLKIASEPPPVREIPPSCAPLTAQAIQEGLRKEPIHRVSAAELGGKVNRALQQVGGLKSPWRGEYKEPRHPPPNQANYHQTLHAQPRELSPRAPGPRPAEETTGRAPKLQPPLPPEPPEPNKSPPLTLSKEESGMWEPLPLSSLEPAPARNPSSPERKATVPEQELQQLEIELFLNSLSQPFSLEEQEQILSCLSIDSLSLSDDSEKNPSKASQSSRDTLSSGVHSWSSQAEARSSSWNMVLARGRPTDTPSYFNGVKVQIQSLNGEHLHIREFHRVKVGDIATGISSQIPAAAFSLVTKDGQPVRYDMEVPDSGIDLQCTLAPDGSFAWSWRVKHGQLENRP

SEQ ID NO: 4440 - protein, 434 aa, Homo sapiens
MAATDIARQVGEGCRTVPLAGHVGFDSLPDQLVNKSVSQGFCFNILCVGETGLGKSTLMDTLFNTKFEGEPATHTQPGVQLQSNTYDLQESNVRLKLTIVSTVGFGDQINKEDSYKPIVEFIDAQFEAYLQEELKIRRVLHTYHDSRIHVCLYFIAPTGHSLKSLDLVTMKKLDSKVNIIPIIAKADAISKSELTKFKIKITSELVSNGVQIYQFPTDDESVAEINGTMNAHLPFAVIGSTEELKIGNKMMRARQYPWGTVQVENEAHCDFVKLREMLIRVNMEDLREQTHTRHYELYRRCKLEEMGFKDTDPDSKPFSLQETYEAKRNEFLGELQKKEEEMRQMFVQRVKEKEAELKEAEKELHEKFDRLKKLHQDEKKKLEDKKKSLDDEVNAFKQRKTAAELLQSQGSQAGGSQTLKRDKEKKNNPWLCTE

SEQ ID NO: 4441 - protein, 427 aa, Homo sapiens
MAATDIARQVGEGCRTVPLAGHVGFDSLPDQLVNKSVSQGFCFNILCVGETGLGKSTLMDTLFNTKFEGEPATHTQPGVQLQSNTYDLQESNVRLKLTIVSTVGFGDQINKEDSYKPIVEFIDAQFEAYLQEELKIRRVLHTYHDSRIHVCLYFIAPTGHSLKSLDLVTMKKLDSKVNIIPIIAKADAISKSELTKFKIKITSELVSNGVQIYQFPTDDESVAEINGTMNAHLPFAVIGSTEELKIGNKMMRARQYPWGTVQVENEAHCDFVKLREMLIRVNMEDLREQTHTRHYELYRRCKLEEMGFKDTDPDSKPFSLQETYEAKRNEFLGELQKKEEEMRQMFVQRVKEKEAELKEAEKELHEKFDRLKKLHQDEKKKLEDKKKSLDDEVNAFKQRKTAAELLQSQGSQAGGSQTLKRDKEKKN

SEQ ID NO: 4442 - protein, 427 aa, Homo sapiens; identical to SEQ ID NO: 4441

SEQ ID NO: 4443 - protein, 429 aa, Homo sapiens
MAATDIARQVGEGCRTVPLAGHVGFDSLPDQLVNKSVSQGFCFNILCVGETGLGKSTLMDTLFNTKFEGEPATHTQPGVQLQSNTYDLQESNVRLKLTIVSTVGFGDQINKEDSYKPIVEFIDAQFEAYLQEELKIRRVLHTYHDSRIHVCLYFIAPTGHSLKSLDLVTMKKLDSKVNIIPIIAKADAISKSELTKFKIKITSELVSNGVQIYQFPTDDESVAEINGTMNAHLPFAVIGSTEELKIGNKMMRARQYPWGTVQVENEAHCDFVKLREMLIRVNMEDLREQTHTRHYELYRRCKLEEMGFKDTDPDSKPFSLQETYEAKRNEFLGELQKKEEEMRQMFVQRVKEKEAELKEAEKELHEKFDRLKKLHQDEKKKLEDKKKSLDDEVNAFKQRKTAAELLQSQGSQAGGSQTLKRDKEKKNFF

SEQ ID NO: 4444 - protein, 417 aa, Homo sapiens
MAQQKNLEGYVGFANLPNQVYRKSVKRGFEFTLMVVGESGLGKSTLINSLFLTDLYSPEYPGPSHRIKKTVQVEQSKVLIKEGGVQLLLTIVDTPGFGDAVDNSNCWQPVIDYIDSKFEDYLNAESRVNRRQMPDNRVQCCLYFIAPSGHGLKPLDIEFMKRLHEKVNIIPLIAKADTLTPEECQQFKKQIMKEIQEHKIKIYEFPETDDEEENKLVKKIKDRLPLAVVGSNTIIEVNGKRVRGRQYPWGVAEVENGEHCDFTILRNMLIRTHMQDLKDVTNNVHYENYRSRKLAAVTYNGVDNNKNKGQLTKSPLAQMEEERREHVAKMKKMEMEMEQVFEMKVKEKVQKLKDSEAELQRRHEQMKKNLEAQHKELEEKRRQFEDEKANWEAQQRILEQQNSSRTLEKNKKKGKIF

SEQ ID NO: 4445 - protein, 418 aa, Homo sapiens
MVAQQKNLEGYVGFANLPNQVYRKSVKRGFEFTLMVVGESGLGKSTLINSLFLTDLYSPEYPGPSHRIKKTVQVEQSKVLIKEGGVQLLLTIVDTPGFGDAVDNSNCWQPVIDYIDSKFEDYLNAESRVNRRQMPDNRVQCCLYFIAPSGHGLKPLDIEFMKRLHEKVNIIPLIAKADTLTPEECQQFKKQIMKEIQEHKIKIYEFPETDDEEENKLVKKIKDRLPLAVVGSNTIIEVNGKRVRGRQYPWGVAEVENGEHCDFTILRNMLIRTHMQDLKDVTNNVHYENYRSRKLAAVTYNGVDNNKNKGQLTKSPLAQMEEERREHVAKMKKMEMEMEQVFEMKVKEKVQKLKDSEAELQRRHEQMKKNLEAQHKELEEKRRQFEDEKANWEAQQRILEQQNSSRTLEKNKKKGKIF

SEQ ID NO: 4446 - protein, 419 aa, Homo sapiens
MAGSGCAWGAEPPRFLEAFGRLWQVQSRLGSGSSASVYRVRCCGNPGSPPGALKQFLPPGTTGAAASAAEYGFRKERAALEQLQGHRNIVTLYGVFTIHFSPNVPSRCLLLELLDVSVSELLLYSSHQGCSMWMIQHCARDVLEALAFLHHEGYVHADLKPRNILWSAENECFKLIDFGLSFKEGNQDVKYIQTDGYRAPEAELQNCLAQAGLQSDTECTSAVDLWSLGIILLEMFSGMKLKHTVRSQEWKANSSAIIDHIFASKAVVNAAIPAYHLRDLIKSMLHDDPSRRIPAEMALCSPFFSIPFAPHIEDLVMLPTPVLRLLNVLDDDYLENEEEYEDVVEDVKEECQKYGPVVSLLVPKENPGRGQVFVEYANAGDSKAAQKLLTGRMFDGKFVVATFYPLSAYKRGYLYQTLL

SEQ ID NO: 4447 - protein, 743 aa, Homo sapiens
MEEEGLECPNSSSEKRYFPESLDSSDGDEEEVLACEDLELNPFDGLPYSSRYYKLLKEREDLPIWKEKYSFMENLLQNQIVIVSGDAKCGKSAQVPQWCAEYCLSIHYQHGGVICTQVHKQTVVQLALRVADEMDVNIGHEVGYVIPFENCCTNETILRYCTDDMLQREMMSNPFLGSYGVIILDDIHERSIATDVLLGLLKDVLLARPELKLIINSSPHLISKLNSYYGNVPVIEVKNKHPVEVVYLSEAQKDSFESILRLIFEIHHSGEKGDIVVFLACEQDIEKVCETVYQGSNLNPDLGELVVVPLYPKEKCSLFKPLDETEKRCQVYQRRVVLTTSSGEFLIWSNSVRFVIDVGVERRKVYNPRIRANSLVMQPISQSQAEIRKQILGSSSSGKFFCLYTEEFASKDMTPLKPAEMQEANLTSMVLFMKRIDIAGLGHCDFMNRPAPESLMQALEDLDYLAALDNDGNLSEFGIIMSEFPLDPQLSKSILASCEFDCVDEVLTIAAMVTAPNCFSHVPHGAEEAALTCWKTFLHPEGDHFTLISIYKAYQDTTLNSSSEYCVEKWCRDYFLNCSALRMADVIRAELLEIIKRIELPYAEPAFGSKENTLNIKKALLSGYFMQIARDVDGSGNYLMLTHKQVAQLHPLSGYSITKKMPEWVLFHKFSISENNYIRITSEISPELFMQLVPQYYFSNLPPSESKDILQQVVDHLSPVSTMNKEQQMCETCPETEQRCTLQ

SEQ ID NO: 4448 - protein, 321 aa, Homo sapiens
MQCRLPRGLAGALLTLLCMGLLCLRYHLNLSPQRVQGTPELSQPNPGPPKLQLHDVFIAVKTTRAFHRLRLELLLDTWVSRTREQTFVFTDSPDKGLQERLGSHLVVTNCSAEHSHPALSCKMAAEFDTFLASGLRWFCHVDDDNYVNPRALLQLLRAFPLARDVYVGRPSLNRPIHASEPQPHNRTRLVQFWFATGGAGFCINRKLALKMAPWASGSRFMDTSALIRLPDDCTMGYIIECKLGGRLQPSPLFHSHLETLQLLRTAQLPEQVTLSYGVFEGKLNVIKLQGPFSPEEDPSRFRSLHCLLYPDTPWCPQLGAR

SEQ ID NO: 4449 - protein, 2230 aa, Homo sapiens
MFKKLKQKISEEQQQLQQALAPAQASSNSSTPTRMRSRTSSFTEQLDEGTPNRESGDTQSFAQKLQLRVPSVESLFRSPIKESLFRSSSKESLVRTSSRESLNRLDLDSSTASFDPPSDMDSEAEDLVGNSDSLNKEQLIQRLRRMERSLSSYRGKYSELVTAYQMLQREKKKLQGILSQSQDKSLRRIAELREELQMDQQAKKHLQEEFDASLEEKDQYISVLQTQVSLLKQRLRNGPMNVDVLKPLPQLEPQAEVFTKEENPESDGEPVVEDGTSVKTLETLQQRVKRQENLLKRCKETIQSHKEQCTLLTSEKEALQEQLDERLQELEKIKDLHMAEKTKLITQLRDAKNLIEQLEQDKGMVIAETKRQMHETLEMKEEEIAQLRSRIKQMTTQGEELREQKEKSERAAFEELEKALSTAQKTEEARRKLKAEMDEQIKTIEKTSEEERISLQQELSRVKQEVVDVMKKSSEEQIAKLQKLHEKELARKEQELTKKLQTREREFQEQMKVALEKSQSEYLKISQEKEQQESLALEELELQKKAILTESENKLRDLQQEAETYRTRILELESSLEKSLQENKNQSKDLAVHLEAEKNKHNKEITVMVEKHKTELESLKHQQDALWTEKLQVLKQQYQTEMEKLREKCEQEKETLLKDKEIIFQAHIEEMNEKTLEKLDVKQTELESLSSELSEVLKARHKLEEELSVLKDQTDKMKQELEAKMDEQKNHHQQQVDSIIKEHEVSIQRTEKALKDQINQLELLLKERDKHLKEHQAHVENLEADIKRSEGELQQASAKLDVFQSYQSATHEQTKAYEEQLAQLQQKLLDLETERILLTKQVAEVEAQKKDVCTELDAHKIQVQDLMQQLEKQNSEMEQKVKSLTQVYESKLEDGNKEQEQTKQILVEKENMILQMREGQKKEIEILTQKLSAKEDSIHILNEEYETKFKNQEKKMEKVKQKAKEMQETLKKKLLDQEAKLKKELENTALELSQKEKQFNAKMLEMAQANSAGISDAVSRLETNQKEQIESLTEVHRRELNDVISIWEKKLNQQAEELQEIHEIQLQEKEQEVAELKQKILLFGCEKEEMNKEITWLKEEGVKQDTTLNELQEQLKQKSAHVNSLAQDETKLKAHLEKLEVDLNKSLKENTFLQEQLVELKMLAEEDKRKVSELTSKLKTTDEEFQSLKSSHEKSNKSLEDKSLEFKKLSEELAIQLDICCKKTEALLEAKTNELINISSSKTNAILSRISHCQHRTTKVKEALLIKTCTVSELEAQLRQLTEEQNTLNISFQQATHQLEEKENQIKSMKADIESLVTEKEALQKEGGNQQQAASEKESCITQLKKELSENINAVTLMKEELKEKKVEISSLSKQLTDLNVQLQNSISLSEKEAAISSLRKQYDEEKCELLDQVQDLSFKVDTLSKEKISALEQVDDWSNKFSEWKKKAQSRFTQHQNTVKELQIQLELKSKEAYEKDEQINLLKEELDQQNKRFDCLKGEMEDDKSKMEKKESNLETELKSQTARIMELEDHITQKTIEIESLNEVLKNYNQQKDIEHKELVQKLQHFQELGEEKDNRVKEAEEKILTLENQVYSMKAELETKKKELEHVNLSVKSKEEELKALEDRLESESAAKLAELKRKAEQKIAAIKKQLLSQMEEKEEQYKKGTESHLSELNTKLQEREREVHILEEKLKSVESSQSETLIVPRSAKNVAAYTEQEEADSQGCVQKTYEEKISVLQRNLTEKEKLLQRVGQEKEETVSSHFEMRCQYQERLIKLEHAEAKQHEDQSMIGHLQEELEEKNKKYSLIVAQHVEKEGGKNNIQAKQNLENVFDDVQKTLQEKELTCQILEQKIKELDSCLVRQKEVHRVEMEELTSKYEKLQALQQMDGRNKPTELLEENTEEKSKSHLVQPKLLSNMEAQHNDLEFKLAGAEREKQKLGKEIVRLQKDLRMLRKEHQQELEILKKEYDQEREEKIKQEQEDLELKHNSTLKQLMREFNTQLAQKEQELEMTIKETINKAQEVEAELLESHQEETNQLLKKIAEKDDDLKRTAKRYEEILDAREEEMTAKVRDLQTQLEELQKKYQQKLEQEENPGNDNVTIMELQTQLAQKTTLISDSKLKEQEFREQIHNLEDRLKKYEKNVYATTVGTPYKGGNLYHTDVSLFGEPTEFEYLRKVLFEYMMGRETKTMAKVITTVLKFPDDQTQKILEREDARLMFTSPRSGIF

SEQ ID NO: 4450 - protein, 106 aa, Homo sapiens
MVNVPKTRRTFCKKCGKHQPHKVTQYKKGKDSLYAQGRRRYDRKQSGYGGQTKPIFRKKAKTTKKIVLRLECVEPNCRSKRMLAIKRCKHFELGGDKKRKGQVIQF

SEQ ID NO: 4451 - protein, 1313 aa, Homo sapiens
MRSAAAAPRSPAVATESRRFAAARWPGWRSLQRPARRSGRGGGGAAPGPYPSAAPPPPGPGPPPSRQSSPPSASDCFGSNGNGGGAFRPGSRRLLGLGGPPRPFVVVLLPLASPGAPPAAPTRASPLGARASPPRSGVSLARPAPGCPRPACEPVYGPLTMSLKPQQQQQQQQQQQQQQQQQQQQQQQPPPAAANVRKPGGSGLLASPAAAPSPSSSSVSSSSATAPSSVVAATSGGGRPGLGRGRNSNKGLPQSTISFDGIYANMRMVHILTSVVGSKCEVQVKNGGIYEGVFKTYSPKCDLVLDAAHEKSTESSSGPKREEIMESILFKCSDFVVVQFKDMDSSYAKRDAFTDSAISAKVNGEHKEKDLEPWDAGELTANEELEALENDVSNGWDPNDMFRYNEENYGVVSTYDSSLSSYTVPLERDNSEEFLKREARANQLAEEIESSAQYKARVALENDDRSEEEKYTAVQRNSSEREGHSINTRENKYIPPGQRNREVISWGSGRQNSPRMGQPGSGSMPSRSTSHTSDFNPNSGSDQRVVNGGVPWPSPCPSPSSRPPSRYQSGPNSLPPRAATPTRPPSRPPSRPSRPPSHPSAHGSPAPVSTMPKRMSSEGPPRMSPKAQRHPRNHRVSAGRGSISSGLEFVSHNPPSEAATPPVARTSPSGGTWSSVVSGVPRLSPKTHRPRSPRQNSIGNTPSGPVLASPQAGIIPTEAVAMPIPAASPTPASPASNRAVTPSSEAKDSRLQDQRQNSPAGNKENIKPNETSPSFSKAENKGISPVVSEHRKQIDDLKKFKNDFRLQPSSTSESMDQLLNKNREGEKSRDLIKDKIEPSAKDSFIENSSSNCTSGSSKPNSPSISPSILSNTEHKRGPEVTSQGVQTSSPACKQEKDDKEEKKDAAEQVRKSTLNPNAKEFNPRSFSQPKPSTTPTSPRPQAQPSPSMVGHQQPTPVYTQPVCFAPNMMYPVPVSPGVQPLYPIPMTPMPVNQAKTYRAVPNMPQQRQDQHHQSAMMHPASAAGPPIAATPPAYSTQYVAYSPQQFPNQPLVQHVPHYQSQHPHVYSPVIQGNARMMAPPTHAQPGLVSSSATQYGAHEQTHAMYACPKLPYNKETSPSFYFAISTGSLAQQYAHPNATLHPHTPHPQPSATPTGQQQSQHGGSHPAPSPVQHHQHQAAQALHLASPQQQSAIYHAGLAPTPPSMTPASNTQSPQNSFPAAQQTVFTIHPSHVQPAYTNPPHMAHVPQAHVQSGMVPSHPTAHAPMMLMTTQPPGGPQAALAQSALQPIPVSTTAHFPYMTHPSVQAHHQQQL

SEQ ID NO: 4452 - protein, 58 aa, Homo sapiens
MDTQKDVQPPKQQPMIYICGECHTENEIKSRDPIRCRECGYRIMYKKRTKRLVVFDAR

SEQ ID NO: 4453 - protein, 672 aa, Homo sapiens
MQNGFSRTLKSGDGITFGVFGSKFRIEYEPLVACSSCLDVSGKTALNQAILQLGGFTVNNWTEECTHLVMVSVKVTIKTICALICGRPIVKPEYFTEFLKAVESKKQPPQIESFYPPLDEPSIGSKNVDLSGRQERKQIFKGKTFIFLNAKQHKKLSSAVVFGGGEARLITEENEEEHNFFLAPGTCVVDTGITNSQTLIPDCQKKWIQSIMDMLQRQGLRPIPEAEIGLAVIFMTTKNYCDPQGHPSTGLKTTTPGPSLSQGVSVDEKLMPSAPVNTTTYVADTESEQADTWDLSERPKEIKVSKMEQKFRMLSQDAPTVKESCKTSSNNNSMVSNTLAKMRIPNYQLSPTKLPSINKSKDRASQQQQTNSIRNYFQPSTKKRERDEENQEMSSCKSARIETSCSLLEQTQPATPSLWKNKEQHLSENEPVDTNSDNNLFTDTDLKSIVKNSASKSHAAEKLRSNKKREMDDVAIEDEVLEQLFKDTKPELEIDVKVQKQEEDVNVRKRPRMDIETNDTFSDEAVPESSKISQENEIGKKRELKEDSLWSAKEISNNDKLQDDSEMLPKKLLLTEFRSLVIKNSTSRNPSGINDDYGQLKNFKKFKKVTYPGAGKLPHIIGGSDLIAHHARKNTELEEWLRQEMEVQNQHAKEESLADDLFRYNPYLKRRR

SEQ ID NO: 4454 - protein, 754 aa, Homo sapiens
MWKLLPAAGPAGGEPYRLLTGVEYVVGRKNCAILIENDQSISRNHAVLTANFSVTNLSQTDEIPVLTLKDNSKYGTFVNEEKMQNGFSRTLKSGDGITFGVFGSKFRIEYEPLVACSSCLDVSGKTALNQAILQLGGFTVNNWTEECTHLVMVSVKVTIKTICALICGRPIVKPEYFTEFLKAVESKKQPPQIESFYPPLDEPSIGSKNVDLSGRQERKQIFKGKTFIFLNAKQHKKLSSAVVFGGGEARLITEENEEEHNFFLAPGTCVVDTGITNSQTLIPDCQKKWIQSIMDMLQRQGLRPIPEAEIGLAVIFMTTKNYCDPQGHPSTGLKTTTPGPSLSQGVSVDEKLMPSAPVNTTTYVADTESEQADTWDLSERPKEIKVSKMEQKFRMLSQDAPTVKESCKTSSNNNSMVSNTLAKMRIPNYQLSPTKLPSINKSKDRASQQQQTNSIRNYFQPSTKKRERDEENQEMSSCKSARIETSCSLLEQTQPATPSLWKNKEQHLSENEPVDTNSDNNLFTDTDLKSIVKNSASKSHAAEKLRSNKKREMDDVAIEDEVLEQLFKDTKPELEIDVKVQKQEEDVNVRKRPRMDIETNDTFSDEAVPESSKISQENEIGKKRELKEDSLWSAKEISNNDKLQDDSEMLPKKLLLTEFRSLVIKNSTSRNPSGINDDYGQLKNFKKFKKVTYPGAGKLPHIIGGSDLIAHHARKNTELEEWLRQEMEVQNQHAKEESLADDLFRYNPYLKRRR

SEQ ID NO: 4455 - protein, 203 aa, Homo sapiens
MAEGDNRSTNLLAAETASLEEQLQGWGEVMLMADKVLRWERAWFPPAIMGVVSLVFLIIYYLDPSVLSGVSCFVMFLCLADYLVPILAPRIFGSNKWTTEQQQRFHEICSNLVKTRRRAVGWWKRLFTLKEEKPKMYFMTMIVSLAAVAWVGQQVHNLLLTYLIVTSLLLLPGLNQHGIILKYIGMAKREINKLLKQKEKKNE

SEQ ID NO: 4456 - protein, 103 aa, Homo sapiens
METVQELIPLAKEMMAQKRKGKMVKLYVLGSVLALFGVVLGLMETVCSPFTAARRLRDQEAAVAELQAALERQALQKQALQEKGKQQDTVLGGRALSNRQHAS

SEQ ID NO: 4457 - protein, 519 aa, Homo sapiens
MDADEGQDMSQVSGKESPPVSDTPDEGDEPMPIPEDLSTTSGGQQSSKSDRVVASNVKVETQSDEENGRACEMNGEECAEDLRMLDASGEKMNGSHRDQGSSALSGVGGIRLPNGKLKCDICGIICIGPNVLMVHKRSHTGERPFQCNQCGASFTQKGNLLRHIKLHSGEKPFKCHLCNYACRRRDALTGHLRTHSVGKPHKCGYCGRSYKQRSSLEEHKERCHNYLESMGLPGTLYPVIKEETNHSEMAEDLCKIGSERSLVLDRLASNVAKRKSSMPQKFLGDKGLSDTPYDSSASYEKENEMMKSHVMDQAINNAINYLGAESLRPLVQTPPGGSEVVPVISPMYQLHKPLAEGTPRSNHSAQDSAVENLLLLSKAKLVPSEREASPSNSCQDSTDTESNNEEQRSGLIYLTNHIAPHARNGLSLKEEHRAYDLLRAASENSQDALRVVSTSGEQMKVYKCEHCRVLFLDHVMYTIHMGCHGFRDPFECNMCGYHSQDRYEFSSHITRGEHRFHMS

SEQ ID NO: 4458 - protein, 352 aa, Homo sapiens
MTEAGKLPLPLPPRLDWFVHTQMGQLAQDGVPEWFHGAISREDAENLLESQPLGSFLIRVSHSHVGYTLSYKAQSSCCHFMVKLLDDGTFMIPGEKVAHTSLDALVTFHQQKPIEPRRELLTQPCRQKDPANVDYEDLFLYSNAVAEEAACPVSAPEEASPKPVLCHQSKERKPSAEMNRITTKEATSSCPPKSPLGETRQKLWRSLKMLPERGQRVRQQLKSHLATVNLSSLLDVRRSTVISGPGTGKGSQDHSGDPTSGDRGYTDPCVATSLKSPSQPQAPKDRKVPTRKAERSVSCIEVTPGDRSWHQMVVRALSSQESKPEHQGLAEPENDQLPEEYQQPPPFAPGYC

SEQ ID NO: 4459 - protein, 320 aa, Homo sapiens
MGERRGRDGLGAPTVSRPWLQLGGEAEPVLPPLGSGRRARGRPCGHHGAQLLQGDEIWNALTDNYGNVMPVDWKSSHTRTLHLLTLNLSEKGVSDSLLFDTSDDEELREQLDMHSIIVSCVNDEPLFTADQVIEEIEEMMQESPDPEDDETPTQSDRLSMLSQEIQTLKRSSTGSYEERVKRLSVSELNEILEEIETAIKEYSEELVQQLALRDELEFEKEVKNSFISVLIEVQNKQKEHKETAKKKKKLKNGSSQNGKNERSHMPGTYLTTVIPYEKKNGPPSVEDLQILTKILRAMKEDSEKVPSLLTDYILKVLCPT

SEQ ID NO: 4460 - protein, 66 aa, Homo sapiens
MEVDAPGVDGRDGLREQRGFSEGGRQNFDVRPQSGANGLPKHSYWLDLWLFILFDVVVFLFVYFLP

SEQ ID NO: 4461 - protein, 489 aa, Homo sapiens
MALLFLLPLVMQGVSRAEMGTADLGPSSVPTPTNVTIESYNMNPIVYWEYQIMPQVPVFTVEVKNYGVKNSEWIDACINISHHYCNISDHVGDPSNSLWVRVKARVGQKESAYAKSEEFAVCRDGKIGPPKLDIRKEEKQIMIDIFHPSVFVNGDEQEVDYDPETTCYIRVYNVYVRMNGSEIQYKILTQKEDDCDEIQCQLAIPVSSLNSQYCVSAEGVLHVWGVTTEKSKEVCITIFNSSIKGSLWIPVVAALLLFLVLSLVFICFYIKKINPLKEKSIILPKSLISVVRSATLETKPESKYVSLITSYQPFSLEKEVVCEEPLSPATVPGMHTEDNPGKVEHTEELSSITEVVTTEENIPDVVPGSHLTPIERESSSPLSSNQSEPGSIALNSYHSRNCSESDHSRNGFDTDSSCLESHSSLSDSEFPPNNKGEIKTEGQELITVIKAPTSFGYDKPHVLVDLLVDDSGKESLIGYRPTEDSKEFS

SEQ ID NO: 4462 - protein, 914 aa, Homo sapiens
MVQRMWAEAAGPAGGAEPLFPGSRRSRSVWDAVRLEVGVPDSCPVVLHSFTQLDPDLPRPESSTQEIGEELINGVIYSISLRKVQLHHGGNKGQRWLGYENESALNLYETCKVRTVKAGTLEKLVEHLVPAFQGSDLSYVTIFLCTYRAFTTTQQVLDLLFKRYGRCDALTASSRYGCILPYSDEDGGPQDQLKNAISSILGTWLDQYSEDFCQPPDFPCLKQLVAYVQLNMPGSDLERRAHLLLAQLEHSEPIEAEPEALSPVPALKPTPELELALTPARAPSPVPAPAPEPEPAPTPAPGSELEVAPAPAPELQQAPEPAVGLESAPAPALELEPAPEQDPAPSQTLELEPAPAPVPSLQPSWPSPVVAENGLSEEKPHLLVFPPDLVAEQFTLMDAELFKKVVPYHCLGSIWSQRDKKGKEHLAPTIRATVTQFNSVANCVITTCLGNRSTKAPDRARVVEHWIEVARECRILKNFSSLYAILSALQSNSIHRLKKTWEDVSRDSFRIFQKLSEIFSDENNYSLSRELLIKEGTSKFATLEMNPKRAQKRPKETGIIQGTVPYLGTFLTDLVMLDTAMKDYLYGRLINFEKRRKEFEVIAQIKLLQSACNNYSIAPDEQFGAWFRAVERLSETESYNLSCELEPPSESASNTLRTKKNTAIVKRWSDRQAPSTELSTSGSSHSKSCDQLRCGPYLSSGDIADALSVHSAGSSSSDVEEINISFVPESPDGQEKKFWESASQSSPETSGISSASSSTSSSSASTTPVAATRTHKRSVSGLCNSSSALPLYNQQVGDCCIIRVSLDVDNGNMYKSILVTSQDKAPAVIRKAMDKHNLEEEEPEDYELLQILSDDRKLKIPENANVFYAMNSTANYDFVLKKRTFTKGVKVKHGASSTLPRMKQKGLKIAKGIF

SEQ ID NO: 4463 - protein, 231 aa, Homo sapiens
MFLVGLTGGIASGKSSVIQVFQQLGCAVIDVDVMARHVVQPGYPAHRRIVEVFGTEVLLENGDINRKVLGDLIFNQPDRRQLLIAITHPEIRKEMMKETFKYFLRGYRYVILDIPLLFETKKLLKYMKHTVVVYCDRDTQLARLMRRNSLNRKDAEARINAQLPLTDKARMARHVLDNSGEWSVTKRQVILLHTELERSLEYLPLRFGVLTGLAAIASLLYLLTHYLLPYA

SEQ ID NO: 4464 - protein, 676 aa, Homo sapiens
MAKVNITRDLIRRQIKERGALSFERRYHVTDPFIRRLGLEAELQGHSGCVNCLEWNEKGDLLASGSDDQHTIVWDPLHHKKLLSMHTGHTANIFSVKFLPHAGDRILITGAADSKVHVHDLTVKETIHMFGDHTNRVKRIATAPMWPNTFWSAAEDGLIRQYDLRENSKHSEVLIDLTEYCGQLVEAKCLTVNPQDNNCLAVGASGPFVRLYDIRMIHNHRKSMKQSPSAGVHTFCDRQKPLPDGAAQYYVAGHLPVKLPDYNNRLRVLVATYVTFSPNGTELLVNMGGEQVYLFDLTYKQRPYTFLLPRKCHSSGVQNGKMSTNGVSNGVSNGLHLHSNGFRLPESRGHVSPQVELPPYLERVKQQANEAFACQQWTQAIQLYSKAVQRAPHNAMLYGNRAAAYMKRKWDGDHYDALRDCLKAISLNPCHLKAHFRLARCLFELKYVAEALECLDDFKGKFPEQAHSSACDALGRDITAALFSKNDGEEKKGPGGGAPVRLRSTSRKDSISEDEMVLRERSYDYQFRYCGHCNTTTDIKEANFFGSNAQYIVSGSDDGSFFIWEKETTNLVRVLQGDESIVNCLQPHPSYCFLATSGIDPVVRLWNPRPESEDLTGRVVEDMEGASQANQRRMNADPLEVMLLNMGYRITGLSSGGAGASDDEDSSEGQVQCRPS

SEQ ID NO: 4465 - protein, 1203 aa, Homo sapiens
MAACGRVRRMFRLSAALHLLLLFAAGAEKLPGQGVHSQGQGPGANFVSFVGQAGGGGPAGQQLPQLPQSSQLQQQQQQQQQQQQPQPPQPPFPAGGPPARRGGAGAGGGWKLAEEESCREDVTRVCPKHTWSNNLAVLECLQDVREPENEISSDCNHLLWNYKLNLTTDPKFESVAREVCKSTITEIKECADEPVGKGYMVSCLVDHRGNITEYQCHQYITKMTAIIFSDYRLICGFMDDCKNDINILKCGSIRLGEKDAHSQGEVVSCLEKGLVKEAEEREPKIQVSELCKKAILRVAELSSDDFHLDRHLYFACRDDRERFCENTQAGEGRVYKCLFNHKFEESMSEKCREALTTRQKLIAQDYKVSYSLAKSCKSDLKKYRCNVENLPRSREARLSYLLMCLESAVHRGRQVSSECQGEMLDYRRMLMEDFSLSPEIILSCRGEIEHHCSGLHRKGRTLHCLMKVVRGEKGNLGMNCQQALQTLIQETDPGADYRIDRALNEACESVIQTACKHIRSGDPMILSCLMEHLYTEKMVEDCEHRLLELQYFISRDWKLDPVLYRKCQGDASRLCHTHGWNETSEFMPQGAVFSCLYRHAYRTEEQGRRLSRECRAEVQRILHQRAMDVKLDPALQDKCLIDLGKWCSEKTETGQELECLQDHLDDLVVECRDIVGNLTELESEDIQIEALLMRACEPIIQNFCHDVADNQIDSGDLMECLIQNKHQKDMNEKCAIGVTHFQLVQMKDFRFSYKFKMACKEDVLKLCPNIKKKVDVVICLSTTVRNDTLQEAKEHRVSLKCRRQLRVEELEMTEDIRLEPDLYEACKSDIKNFCSAVQYGNAQIIECLKENKKQLSTRCHQKVFKLQETEMMDPELDYTLMRVCKQMIKRFCPEADSKTMLQCLKQNKNSELMDPKCKQMITKRQITQNTDYRLNPMLRKACKADIPKFCHGILTKAKDDSELEGQVISCLKLRYADQRLSSDCEDQIRIIIQESALDYRLDPQLQLHCSDEISSLCAEEAAAQEQTGQVEECLKVNLLKIKTELCKKEVLNMLKESKADIFVDPVLHTACALDIKHHCAAITPGRGRQMSCLMEALEDKRVRLQPECKKRLNDRIEMWSYAAKVAPADGFSDLAMQVMTSPSKNYILSVISGSICILFLIGLMCGRITKRVTRELKDRLQYRSETMAYKGLVWSQDVTGSPA

SEQ ID NO: 4466 - protein, 1078 aa, Homo sapiens
MAPRKRGGRGISFIFCCFRNNDHPEITYRLRNDSNFALQTMEPALPMPPVEELDVMFSELVDELDLTDKHREAMFALPAEKKWQIYCSKKKDQEENKGATSWPEFYIDQLNSMAARKSLLALEKEEEEERSKTIESLKTALRTKPMRFVTRFIDLDGLSCILNFLKTMDYETSESRIHTSLIGCIKALMNNSQGRAHVLAHSESINVIAQSLSTENIKTKVAVLEILGAVCLVPGGHKKVLQAMLHYQKYASERTRFQTLINDLDKSTGRYRDEVSLKTAIMSFINAVLSQGAGVESLDFRLHLRYEFLMLGIQPVIDKLREHENSTLDRHLDFFEMLRNEDELEFAKRFELVHIDTKSATQMFELTRKRLTHSEAYPHFMSILHHCLQMPYKRSGNTVQYWLLLDRIIQQIVIQNDKGQDPDSTPLENFNIKNVVRMLVNENEVKQWKEQAEKMRKEHNELQQKLEKKERECDAKTQEKEEMMQTLNKMKEKLEKETTEHKQVKQQVADLTAQLHELSRRAVCASIPGGPSPGAPGGPFPSSVPGSLLPPPPPPPLPGGMLPPPPPPLPPGGPPPPPGPPPLGAIMPPPGAPMGLALKKKSIPQPTNALKSFNWSKLPENKLEGTVWTEIDDTKVFKILDLEDLERTFSAYQRQQDFFVNSNSKQKEADAIDDTLSSKLKVKELSVIDGRRAQNCNILLSRLKLSNDEIKRAILTMDEQEDLPKDMLEQLLKFVPEKSDIDLLEEHKHELDRMAKADRFLFEMSRINHYQQRLQSLYFKKKFAERVAEVKPKVEAIRSGSEEVFRSGALKQLLEVVLAFGNYMNKGQRGNAYGFKISSLNKIADTKSSIDKNITLLHYLITIVENKYPSVLNLNEELRDIPQAAKVNMTELDKEISTLRSGLKAVETELEYQKSQPPQPGDKFVSVVSQFITVASFSFSDVEDLLAEAKDLFTKAVKHFGEEAGKIQPDEFFGIFDQFLQAVSEAKQENENMRKKKEEEERRARMEAQLKEQRERERKMRKAKENSEESGEFDDLVSALRSGEVFDKDLSKLKRNRKRITNQMTDSSRERPITKLNF

SEQ ID NO: 4467 - protein, 225 aa, Homo sapiens
MDQQAIYAELNLPTDSGPESSSPSSLPRDVCQGSPWHQFALKLSCAGIILLVLVVTGLSVSVTSLIQKSSIEKCSVDIQQSRNKTTERPGLLNCPIYWQQLREKCLLFSHTVNPWNNSLADCSTKESSLLLIRDKDELIHTQNLIRDKAILFWIGLNFSLSEKNWKWINGSFLNSNDLEIRGDAKENSCISISQTSVYSEYCSTEIRWICQKELTPVRNKVYPDS

SEQ ID NO: 4468 - protein, 322 aa, Homo sapiens
MSSSPWEPATLRRVFVVGVGMTKFVKPGAENSRDYPDLAEEAGKKALADAQIPYSAVDQACVGYVFGVAECVLALGFEKMSKGSLGIKFSDRTIPTDKHVDLLINKYGLSAHPVAPQMFGYAGKEHMEKYGTKIEHFAKIGWKNHKHSVNNPYSQFQDEYSLDEVMASKEVFDFLTILQCCPTSDGAAAAILASEAFVQKYGLQSKAVEILAQEMMTDLPSSFEEKSIIKMVGFDMSKEAARKCYEKSGLTPNDIDVIELHDCFSTNELLTYEALGLCPEGQGATLVDRGDNTYGGKWVINPSGGLISKGHPLGATGGHSCS

SEQ ID NO: 4469 - protein, 143 aa, Homo sapiens
MGFPEAASSFRTHQIEAVPTSSASDGFKANLVFKEIEKKLEEEGEQFVKKIGGIFAFKVKDGPGGKEATWVVDVKNGKGSVLPNSDKKADCTITMADSDFLALMTGKMNPQSAFFQGKLKITGNMGLAMKLQNLQLQPGNAKL

SEQ ID NO: 4470 - protein, 140 aa, Homo sapiens
MGFPEAARTHQIEAVPTSSASDGFKANLVFKEIEKKLEEEGEQFVKKIGGIFAFKVKDGPGGKEATWVVDVKNGKGSVLPNSDKKADCTITMADSDFLALMTGKMNPQSAFFQGKLKITGNMGLAMKLQNLQLQPGNAKL

SEQ ID NO: 4471 - protein, 59 aa, Homo sapiens
MGFPEAASSFRTHQIEAVPTSSASDGFKANLVFKEIEKKLEEIRRLTAQSQWLTQTSWL

SEQ ID NO: 4472 - protein, 547 aa, Homo sapiens
MSSSPWEPATLRRVFVVGVGMTKFVKPGAENSRDYPDLAEEAGKKALADAQIPYSAVDQACVGYVFGDSTCGQRAIYHSLGMTGIPIINVNNNCATGSTALFMARQLIQGGVAECVLALGFEKMSKGSLGIKFSDRTIPTDKHVDLLINKYGLSAHPVAPQMFGYAGKEHMEKYGTKIEHFAKIGWKNHKHSVNNPYSQFQDEYSLDEVMASKEVFDFLTILQCCPTSDGAAAAILASEAFVQKYGLQSKAVEILAQEMMTDLPSSFEEKSIIKMVGFDMSKEAARKCYEKSGLTPNDIDVIELHDCFSTNELLTYEALGLCPEGQGATLVDRGDNTYGGKWVINPSGGLISKGHPLGATGLAQCAELCWQLRGEAGKRQVPGAKVALQHNLGIGGAVVVTLYKMGFPEAASSFRTHQIEAVPTSSASDGFKANLVFKEIEKKLEEEGEQFVKKIGGIFAFKVKDGPGGKEATWVVDVKNGKGSVLPNSDKKADCTITMADSDFLALMTGKMNPQSAFFQGKLKITGNMGLAMKLQNLQLQPGNAKL

SEQ ID NO: 4473 - protein, 740 aa, Homo sapiens
MTVKLDFEECLKDSPRFRASIELVEAEVSELETRLEKLLKLGTGLLESGRHYLAASRAFVVGICDLARLGPPEPMMAECLEKFTVSLNHKLDSHAELLDATQHTLQQQIQTLVKEGLRGFREARRDFWRGAESLEAALTHNAEVPRRRAQEAEEAGAALRTARAGYRGRALDYALQINVIEDKRKFDIMEFVLRLVEAQATHFQQGHEELSRLSQYRKELGAQLHQLVLNSAREKRDMEQRHVLLKQKELGGEEPEPSLREGPGGLVMEGHLFKRASNAFKTWSRRWFTIQSNQLVYQKKYKDPVTVVVDDLRLCTVKLCPDSERRFCFEVVSTSKSCLLQADSERLLQLWVSAVQSSIASAFSQARLDDSPRGPGQGSGHLAIGSAATLGSGGMARGREPGGVGHVVAQVQSVDGNAQCCDCREPAPEWASINLGVTLCIQCSGIHRSLGVHFSKVRSLTLDSWEPELVKLMCELGNVIINQIYEARVEAMAVKKPGPSCSRQEKEAWIHAKYVEKKFLTKLPEIRGRRGGRGRPRGQPPVPPKPSIRPRPGSLRSKPEPPSEDLGSLHPGALLFRASGHPPSLPTMADALAHGADVNWVNGGQDNATPLIQATAANSLLACEFLLQNGANVNQADSAGRGPLHHATILGHTGLACLFLKRGADLGARDSEGRDPLTIAMETANADIVTLLRLAKMREAEAAQGQAGDETYLDIFRDFSLMASDDPEKLSRRSHDLHTL

SEQ ID NO: 4474 - protein, 438 aa, Homo sapiens
MQAEDRSQFGSAAEMLSEQTAALGTGWESMNVQLDGAEPQVERGSQEERPWRTVPGPLEHLCCDLEEEPQSLQEKAQSAPWVPAIPQEGNTGDWEMAAALLAAGSQGLVTIKDVSLCFSQEEWRSLDPSQTDFYGEYVMQENCGIVVSLRFPIPKLDMLSQLEGGEEQWVPDPQDLEERDILRVTYTGGGSEHEGDTPELEAEPPRMLSSVSEDTVLWNPEHDESWDSMPSSSRGMLLGPPFLQEDSFSNLLCSTEMDSLLRPHTCPQCGKQFVWGSHLARHQQTHTGERPYSCLKCEKTFGRRHHLIRHQKTHLHDKTSRCSECGKNFRCNSHLASHQRVHAEGKSCKGQEVGESPGTRKRQRAPPVPKCHVCTECGKSFGRRHHLVRHWLTHTGEKPFQCPRCEKSFGRKHHLDRHLLTHQGQSPRNSWDRGTSVF

SEQ ID NO: 4475 - protein, 469 aa, Homo sapiens
MFSEQAAQRAHTLLSPPSANNATFARVPVATYTNSSQPFRLGERSFSRQYAHIYATRLIQMRPFLENRAQQHWGSGVGVKKLCELQPEEKCCVVGTLFKAMPLQPSILREVSEEHNLLPQPPRSKYIHPDDELVLEDELQRIKLKGTIDVSKLVTGTVLAVFGSVRDDGKFLVEDYCFADLAPQKPAPPLDTDRFVLLVSGLGLGGGGGESLLGTQLLVDVVTGQLGDEGEQCSAAHVSRVILAGNLLSHSTQSRDSINKAKYLTKKTQAASVEAVKMLDEILLQLSASVPVDVMPGEFDPTNYTLPQQPLHPCMFPLATAYSTLQLVTNPYQATIDGVRFLGTSGQNVSDIFRYSSMEDHLEILEWTLRVRHISPTAPDTLGCYPFYKTDPFIFPECPHVYFCGNTPSFGSKIIRGPEDQTVLLVTVPDFSATQTACLVNLRSLACQPISFSGFGAEDDDLGGLGLGP

SEQ ID NO: 4476 - protein, 377 aa, Homo sapiens
MRRLNRKKTLSLVKELDAFPKVPESYVETSASGGTVSLIAFTTMALLTIMEFSVYQDTWMKYEYEVDKDFSSKLRINIDITVAMKCQYVGADVLDLAETMVASADGLVYEPTVFDLSPQQKEWQRMLQLIQSRLQEEHSLQDVIFKSAFKSTSTALPPREDDSSQSPNACRIHGHLYVNKVAGNFHITVGKAIPHPRGHAHLAALVNHESYNFSHRIDHLSFGELVPAIINPLDGTEKIAIDHNQMFQYFITVVPTKLHTYKISADTHQFSVTERERIINHAAGSHGVSGIFMKYDLSSLMVTVTEEHMPFWQFFVRLCGIVGGIFSTTGMLHGIGKFIVEIICCRFRLGSYKPVNSVPFEDGHTDNHLPLLENNTH

SEQ ID NO: 4477 - protein, 800 aa, Homo sapiens
MAALAEEQTEVAVKLEPEGPPTLLPPQAGDGAGEGSGGTTNNGPNGGGGNVAASSSTGGDGGTPKPTVAVSAAAPAGAAPVPAAAPDAGAPHDRQTLLAVLQFLRQSKLREAEEALRREAGLLEEAVAGSGAPGEVDSAGAEVTSALLSRVTASAPGPAAPDPPGTGASGATVVSGSASGPAAPGKVGSVAVEDQPDVSAVLSAYNQQGDPTMYEEYYSGLKHFIECSLDCHRAELSQLFYPLFVHMYLELVYNQHENEAKSFFEKFHGDQECYYQDDLRVLSSLTKKEHMKGNETMLDFRTSKFVLRISRDSYQLLKRHLQEKQNNQIWNIVQEHLYIDIFDGMPRSKQQIDAMVGSLAGEAKREANKSKVFFGLLKEPEIEVPLDDEDEEGENEEGKPKKKKPKKDSIGSKSKKQDPNAPPQNRIPLPELKDSDKLDKIMNMKETTKRVRLGPDCLPSICFYTFLNAYQGLTAVDVTDDSSLIAGGFADSTVRVWSVTPKKLRSVKQASDLSLIDKESDDVLERIMDEKTASELKILYGHSGPVYGASFSPDRNYLLSSSEDGTVRLWSLQTFTCLVGYKGHNYPVWDTQFSPYGYYFVSGGHDRVARLWATDHYQPLRIFAGHLADVNCTRFHPNSNYVATGSADRTVRLWDVLNGNCVRIFTGHKGPIHSLTFSPNGRFLATGATDGRVLLWDIGHGLMVGELKGHTDTVCSLRFSRDGEILASGSMDNTVRLWDAIKAFEDLETDDFTTATGHINLPENSQELLLGTYMTKSTPVVHLHFTRRNLVLAAGAYSPQ

SEQ ID NO: 4478 - protein, 725 aa, Homo sapiens
MAMAMSDSGASRLRRQLESGGFEARLYVKQLSQQSDGDRDLQEHRQRIQALAEETAQNLKRNVYQNYRQFIETAREISYLESEMYQLSHLLTEQKSSLESIPLTLLPAAAAAGAAAASGGEEGVGGAGGRDHLRGQAGFFSTPGGASRDGSGPGEEGKQRTLTTLLEKVEGCRHLLETPGQYLVYNGDLVEYDADHMAQLQRVHGFLMNDCLLVATWLPQRRGMYRYNALYSLDGLAVVNVKDNPPMKDMFKLLMFPESRIFQAENAKIKREWLEVLEDTKRALSEKRRREQEEAAAPRGPPQVTSKATNPFEDDEEEEPAVPEVEEEKVDLSMEWIQELPEDLDVCIAQRDFEGAVDLLDKLNHYLEDKPSPPPVKELRAKVEERVRQLTEVLVFELSPDRSLRGGPKATRRAVSQLIRLGQCTKACELFLRNRAAAVHTAIRQLRIEGATLLYIHKLCHVFFTSLLETAREFEIDFAGTDSGCYSAFVVWARSAMGMFVDAFSKQVFDSKESLSTAAECVKVAKEHCQQLGDIGLDLTFIIHALLVKDIQGALHSYKEIIIEATKHRNSEEMWRRMNLMTPEALGKLKEEMKSCGVSNFEQYTGDDCWVNLSYTVVAFTKQTMGFLEEALKLYFPELHMVLLESLVEIILVAVQHVDYSLRCEQDPEKKAFIRQNASFLYETVLPVVEKRFEEGVGKPAKQLQDLRNASRLIRVNPESTTSVV

SEQ ID NO: 4479 - protein, 92 aa, Homo sapiens
MTKLEEHLEGIVNIFHQYSVRKGHFDTLSKGELKQLLTKELANTIKNIKDKAVIDEIFQGLDANQDEQVDFQEFISLVAIALKAAHYHTHKE

SEQ ID NO: 4480 - protein, 304 aa, Homo sapiens
MAEASAAGADSGAAVAAHRFFCHFCKGEVSPKLPEYICPRCESGFIEEVTDDSSFLGGGGSRIDNTTTTHFAELWGHLDHTMFFQDFRPFLSSSPLDQDNRANERGHQTHTDFWGARPPRLPLGRRYRSRGSSRPDRSPAIEGILQHIFAGFFANSAIPGSPHPFSWSGMLHSNPGDYAWGQTGLDAIVTQLLGQLENTGPPPADKEKITSLPTVTVTQEQVDMGLECPVCKEDYTVEEEVRQLPCNHFFHSSCIVPWLELHDTCPVCRKSLNGEDSTRQSQSTEASASNRFSNDSQLHDRWTF

SEQ ID NO: 4481 - protein, 815 aa, Homo sapiens
MGSDKRVSRTERSGRYGSIIDRDDRDERESRSRRRDSDYKRSSDDRRGDRYDDYRDYDSPERERERRNSDRSEDGYHSDGDYGEHDYRHDISDERESKTIMLRGLPITITESDIREMMESFEGPQPADVRLMKRKTGVSRGFAFVEFYHLQDATSWMEANQKKLVIQGKHIAMHYSNPRPKFEDWLCNKCCLNNFRKRLKCFRCGADKFDSEQEVPPGTTESVQSVDYYCDTIILRNIAPHTVVDSIMTALSPYASLAVNNIRLIKDKQTQQNRGFAFVQLSSAMDASQLLQILQSLHPPLKIDGKTIGVDFAKSARKDLVLSDGNRVSAFSVASTAIAAAQWSSTQSQSGEGGSVDYSYLQPGQDGYAQYAQYSQDYQQFYQQQAGGLESDASSASGTAVTTTSAAVVSQSPQLYNQTSNPPGSPTEEAQPSTSTSTQAPAASPTGVVPGTKYAVPDTSTYQYDESSGYYYDPTTGLYYDPNSQYYYNSLTQQYLYWDGEKETYVPAAESSSHQQSGLPPAKEGKEKKEKPKSKTAQQIAKDMERWAKSLNKQKENFKNSFQPVNSLREEERRESAAADAGFALFEKKGALAERQQLIPELVRNGDEENPLKRGLVAAYSGDSDNEEELVERLESEEEKLADWKKMACLLCRRQFPNKDALVRHQQLSDLHKQNMDIYRRSRLSEQELEALELREREMKYRDRAAERREKYGIPEPPEPKRKKQFDAGTVNYEQPTKDGIDHSNIGNKMLQAMGWREGSGLGRKCQGITAPIEAQVRLKGAGLGAKGSAYGLSGADSYKDAVRKAMFARFTEME

SEQ ID NO: 4482 - protein, 456 aa, Homo sapiens
MGDGGGVRENPKMNKDSHSIARPGAARAPQDSRRVTRPRRAGFAPARATSDSALGSGSGAPQSSRPLDRARRSGESGATRRAVARMEEAGAAVVTAGEAELNWSRLSVSTETLESELEARGEERRGAREALLRLLLPHNRLVSLPRALGSGFPHLQLLDVSGNALTALGPELLALRGLRTLLAKNNRLGGPSALPKGLAQSPLCRSLQVLNLSGNCFQEVPASLLELRALQTLSLGGNQLQSIPAEIENLQSLECLYLGGNFIKEIPPELGNLPSLNYLVLCDNKIQSIPPQLSQLHSLRSLSLHNNLLTYLPREILNLIHLEELSLRGNPLVVRFVRDLTYDPPTLLELAARTIKIRNISYTPYDLPGNLLRYLGSASNCPNPKCGGVYFDCCVRQIKFVDFCGKYRLPLMHYLCSPECSSPCSSASHSSTSQSESDSEDEASVAARRMQKVLLG

SEQ ID NO: 4483 - protein, 456 aa, Homo sapiens; identical to SEQ ID NO: 4482

SEQ ID NO: 4484 - protein, 486 aa, Homo sapiens
MVAGMLGLREEKSEDQDLQGLKDKPLKFKKVKKDKKEEKEGKHEPVQPSAHHSAEPAEAGKAETSEGSGSAPAVPEASASPKQRRSIIRDRGPMYDDPTLPEGWTRKLKQRKSGRSAGKYDVYLINPQGKAFRSKVELIAYFEKVGDTSLDPNDFDFTVTGRGSPSRREQKPPKKPKSPKAPGTGRGRGRPKGSGTTRPKAATSEGVQVKRVLEKSPGKLLVKMPFQTSPGGKAEGGGATTSTQVMVIKRPGRKRKAEADPQAIPKKRGRKPGSVVAAAAAEAKKKAVKESSIRSVQETVLPIKKRKTRETVSIEVKEVVKPLLVSTLGEKSGKGLKTCKSPGRKSKESSPKGRSSSASSPPKKEHHHHHHHSESPKAPVPLLPPLPPPPPEPESSEDPTSPPEPQDLSSSVCKEEKMPRGGSLESDGCPKEPAKTQPAVATAATAAEKYKHRGEGERKDIVSSSMPRPNREEPVDSRTPVTERVS

SEQ ID NO: 4485 - protein, 774 aa, Homo sapiens
MAHEAMEYDVQVQLNHAEQQPAPAGMASSQGGPALLQPVPADVVSSQGVPSILQPAPAEVISSQATPPLLQPAPQLSVDLTEVEVLGEDTVENINPRTSEQHRQGSDGNHTIPASSLHSMTNFISGLQRLHGMLEFLRPSSSNHSVGPMRTRRRVSASRRARAGGSQRTDSARLRAPLDAYFQVSRTQPDLPATTYDSETRNPVSEELQVSSSSDSDSDSSAEYGGVVDQAEESGAVILEEQLAGVSAEQEVTCIDGGKTLPKQPSPQKSEPLLPSASMDEEEGDTCTICLEQWTNAGDHRLSALRCGHLFGYRCISTWLKGQVRKCPQCNKKARHSDIVVLYARTLRALDTSEQERMKSSLLKEQMLRKQAELESAQCRLQLQVLTDKCTRLQRRVQDLQKLTSHQSQNLQQPRGSQAWVLSCSPSSQGQHKHKYHFQKTFTVSQAGNCRIMAYCDALSCLVISQPSPQASFLPGFGVKMLSTANMKSSQYIPMHGKQIRGLAFSSYLRGLLLSASLDNTIKLTSLETNTVVQTYNAGRPVWSCCWCLDEANYIYAGLANGSILVYDVRNTSSHVQELVAQKARCPLVSLSYMPRAASAAFPYGGVLAGTLEDASFWEQKMDFSHWPHVLPLEPGGCIDFQTENSSRHCLVTYRPDKNHTTIRSVLMEMSYRLDDTGNPICSCQPVHTFFGGPTCKLLTKNAIFQSPENDGNILVCTGDEAANSALLWDAASGSLLQDLQTDQPVLDICPFEVNRNSYLATLTEKMVHIYKWE

SEQ ID NO: 4486 - protein, 522 aa, Homo sapiens
MAGIIKKQILKHLSRFTKNLSPDKINLSTLKGEGELKNLELDEEVLQNMLDLPTWLAINKVFCNKASIRIPWTKLKTHPICLSLDKVIMEMSTCEEPRSPNGPSPIATASGQSEYGFAEKVVEGISVSVNSIVIRIGAKAFNASFELSQLRIYSVNAHWEHGDLRFTRIQDPQRGEVLTFKEINWQMIRIEADATQSSHLEIMCAPVRLITNQSKIRVTLKRRLKDCNVIATKLVLILDDLLWVLTDSQLKAMVQYAKSLSEAIEKSTEQRKSMAPEPTQSSTVVASAQQVKTTQTSNAPDVNDAIVKLFNDFDVKETSHHLVISHLDLHICDDIHAKEKESNRRITGGAMQLSFTQLTIDYYPYHKAGDSCNHWMYFSDATKTKNGWANELLHEFECNVEMLKQAVKDHNVGSPPKSPTHASPQHTQTEKDYPLKGTCRTPSVLSQQSKAKLMSSSVVVRLADFNIYQVSTAEQCRSSPKSMICCNKKSLYLPQEMSAVYIEFTEYYYPDGKDFPTAFLSR

SEQ ID NO: 4487 - protein, 1464 aa, Homo sapiens
MAGIIKKQILKHLSRFTKNLSPDKINLSTLKGEGELKNLELDEEVLQNMLDLPTWLAINKVFCNKASIRIPWTKLKTHPICLSLDKVIMEMSTCEEPRSPNGPSPIATASGQSEYGFAEKVVEGISVSVNSIVIRIGAKAFNASFELSQLRIYSVNAHWEHGDLRFTRIQDPQRGEVLTFKEINWQMIRIEADATQSSHLEIMCAPVRLITNQSKIRVTLKRRLKDCNVIATKLVLILDDLLWVLTDSQLKAMVQYAKSLSEAIEKSTEQRKSMAPEPTQSSTVVASAQQVKTTQTSNAPDVNDAIVKLFNDFDVKETSHHLVISHLDLHICDDIHAKEKESNRRITGGAMQLSFTQLTIDYYPYHKAGDSCNHWMYFSDATKTKNGWANELLHEFECNVEMLKQAVKDHNVGSPPKSPTHASPQHTQTEKDYPLKGTCRTPSVLSQQSKAKLMSSSVVVRLADFNIYQVSTAEQCRSSPKSMICCNKKSLYLPQEMSAVYIEFTEYYYPDGKDFPIPSPNLYSQLNALQFTVDERSILWLNQFLLDLKQSLNQFMAVYKLNDNSKSDEHVDVRVDGLMLKFVIPSEVKSECHQDQPRAISIQSSEMIATNTRHCPNCRHSDLEALFQDFKDCDFFSKTYTSFPKSCDNFNLLHPIFQRHAHEQDTKMHEIYKGNITPQLNKNTLKTSAATDVWAVYFSQFWIDYEGMKSGKGRPISFVDSFPLSIWICQPTRYAESQKEPQTCNQVSLNTSQSESSDLAGRLKRKKLLKEYYSTESEPLTNGGQKPSSSDTFFRFSPSSSEADIHLLVHVHKHVSMQINHYQYLLLLFLHESLILLSENLRKDVEAVTGSPASQTSICIGILLRSAELALLLHPVDQANTLKSPVSESVSPVVPDYLPTENGDFLSSKRKQISRDINRIRSVTVNHMSDNRSMSVDLSHIPLKDPLLFKSASDTNLQKGISFMDYLSDKHLGKISEDESSGLVYKSGSGEIGSETSDKKDSFYTDSSSILNYREDSNILSFDSDGNQNILSSTLTSKGNETIESIFKAEDLLPEAASLSENLDISKEETPPVRTLKSQSSLSGKPKERCPPNLAPLCVSYKNMKRSSSQMSLDTISLDSMILEEQLLESDGSDSHMFLEKGNKKNSTTNYRGTAESVNAGANLQNYGETSPDAISTNSEGAQENHDDLMSVVVFKITGVNGEIDIRGEDTEICLQVNQVTPDQLGNISLRHYLCNRPVGSDQKAVIHSKSSPEISLRFESGPGAVIHSLLAEKNGFLQCHIENFSTEFLTSSLMNIQHFLEDETVATVMPMKIQVSNTKINLKDDSPRSSTVSLEPAPVTVHIDHLVVERSDDGSFHIRDSHMLNTGNDLKENVKSDSVLLTSGKYDLKKQRSVTQATQTSPGVPWPSQSANFPEFSFDFTREQLMEENESLKQELAKAKMALAEAHLEKDALLHHIKKMTVE

SEQ ID NO: 4488 - protein, 699 aa, Homo sapiens
MAACEGRRSGALGSSQSDFLTPPVGGAPWAVATTVVMYPPPPPPPHRDFISVTLSFGESYDNSKSWRRRSCWRKWKQLSRLQRNMILFLLAFLLFCGLLFYINLADHWKALAFRLEEEQKMRPEIAGLKPANPPVLPAPQKADTDPENLPEISSQKTQRHIQRGPPHLQIRPPSQDLKDGTQEEATKRQEAPVDPRPEGDPQRTVISWRGAVIEPEQGTELPSRRAEVPTKPPLPPARTQGTPVHLNYRQKGVIDVFLHAWKGYRKFAWGHDELKPVSRSFSEWFGLGLTLIDALDTMWILGLRKEFEEARKWVSKKLHFEKDVDVNLFESTIRILGGLLSAYHLSGDSLFLRKAEDFGNRLMPAFRTPSKIPYSDVNIGTGVAHPPRWTSDSTVAEVTSIQLEFRELSRLTGDKKFQEAVEKVTQHIHGLSGKKDGLVPMFINTHSGLFTHLGVFTLGARADSYYEYLLKQWIQGGKQETQLLEDYVEAIEGVRTHLLRHSEPSKLTFVGELAHGRFSAKMDHLVCFLPGTLALGVYHGLPASHMELAQELMETCYQMNRQMETGLSPEIVHFNLYPQPGRRDVEVKPADRHNLLRPETVESLFYLYRVTGDRKYQDWGWEILQSFSRFTRVPSGGYSSINNVQDPQKPEPRDKMESFFLGETLKYLFLLFSDDPNLLSLDAYVFNTEAHPLPIWTPA

SEQ ID NO: 4489 - protein, 310 aa, Homo sapiens
MDRLLRLGGGMPGLGQGPPTDAPAVDTAEQVYISSLALLKMLKHGRAGVPMEVMGLMLGEFVDDYTVRVIDVFAMPQSGTGVSVEAVDPVFQAKMLDMLKQTGRPEMVVGWYHSHPGFGCWLSGVDINTQQSFEALSERAVAVVVDPIQSVKGKVVIDAFRLINANMMVLGHEPRQTTSNLGHLNKPSIQALIHGLNRHYYSITINYRKNELEQKMLLNLHKKSWMEGLTLQDYSEHCKHNESVVKEMLELAKNYNKAVEEEDKMTPEQLAIKNVGKQDPKRHLEEHVDVLMTSNIVQCLAAMLDTVVFK

SEQ ID NO: 4490 - protein, 658 aa, Homo sapiens
MAEAAAAAGGTGLGAGASYGSAADRDRDPDPDRAGRRLRVLSGHLLGRPREALSTNECKARRAASAATAAPTATPAAQESGTIPKKRQEVMKWNGWGYNDSKFIFNKKGQIELTGKRYPLSGMGLPTFKEWIQNTLGVNVEHKTTSKASLNPSDTPPSVVNEDFLHDLKETNISYSQEADDRVFRAHGHCLHEIFLLREGMFERIPDIVLWPTCHDDVVKIVNLACKYNLCIIPIGGGTSVSYGLMCPADETRTIISLDTSQMNRILWVDENNLTAHVEAGITGQELERQLKESGYCTGHEPDSLEFSTVGGWVSTRASGMKKNIYGNIEDLVVHIKMVTPRGIIEKSCQGPRMSTGPDIHHFIMGSEGTLGVITEATIKIRPVPEYQKYGSVAFPNFEQGVACLREIAKQRCAPASIRLMDNKQFQFGHALKPQVSSIFTSFLDGLKKFYITKFKGFDPNQLSVATLLFEGDREKVLQHEKQVYDIAAKFGGLAAGEDNGQRGYLLTYVIAYIRDLALEYYVLGESFETSAPWDRVVDLCRNVKERITRECKEKGVQFAPFSTCRVTQTYDAGACIYFYFAFNYRGISDPLTVFEQTEAAAREEILANGGSLSHHHGVGKLRKQWLKESISDVGFGMLKSVKEYVDPNNIFGNRNLL

SEQ ID NO: 4491 - protein, 1031 aa, Homo sapiens
MPPGRWHAAYPAQAQSSRERGRLQTVKKEEEDESYTPVQAARPQTLNRPGQELFRQLFRQLRYHESSGPLETLSRLRELCRWWLRPDVLSKAQILELLVLEQFLSILPGELRVWVQLHNPESGEEAVALLEELQRDLDGTSWRDPGPAQSPDVHWMGTGALRSAQIWSLASPLRSSSALGDHLEPPYEIEARDFLAGQSDTPAAQMPALFPREGCPGDQVTPTRSLTAQLQETMTFKDVEVTFSQDEWGWLDSAQRNLYRDVMLENYRNMASLVGPFTKPALISWLEAREPWGLNMQAAQPKGNPVAAPTGDDLQSKTNKFILNQEPLEEAETLAVSSGCPATSVSEGIGLRESFQQKSRQKDQCENPIQVRVKKEETNFSHRTGKDSEVSGSNSLDLKHVTYLRVSGRKESLKHGCGKHFRMSSHHYDYKKYGKGLRHMIGGFSLHQRIHSGLKGNKKDVCGKDFSLSSHHQRGQSLHTVGVSFKCSDCGRTFSHSSHLAYHQRLHTQEKAFKCRVCGKAFRWSSNCARHEKIHTGVKPYKCDLCEKAFRRLSAYRLHRETHAKKKFLELNQYRAALTYSSGFDHHLGDQSGEKLFDCSQCRKSFHCKSYVLEHQRIHTQEKPYKCTKCRKTFRWRSNFTRHMRLHEEEKFYKQDECREGFRQSPDCSQPQGAPAVEKTFLCQQCGKTFTRKKTLVDHQRIHTGEKPYQCSDCGKDFAYRSAFIVHKKKHAMKRKPEGGPSFSQDTVFQVPQSSHSKEEPYKCSQCGKAFRNHSFLLIHQRVHTGEKPYKCRECGKAFRWSSNLYRHQRIHSLQKQYDCHESEKTPNVEPKILTGEKRFWCQECGKTFTRKRTLLDHKGIHSGEKRYKCNLCGKSYDRNYRLVNHQRIHSTERPFKCQWCGKEFIGRHTLSSHQRKHTRAAQAERSPPARSSSQDTKLRLQKLKPSEEMPLEDCKEACSQSSRLTGLQDISIGKKCHKCSICGKTFNKSSQLISHKRFHTRERPFKCSKCGKTFRWSSNLARHMKNHIRD

SEQ ID NO: 4492 - protein, 390 aa, Homo sapiens
MPPSGLRLLPLLLPLLWLLVLTPGRPAAGLSTCKTIDMELVKRKRIEAIRGQILSKLRLASPPSQGEVPPGPLPEAVLALYNSTRDRVAGESAEPEPEPEADYYAKEVTRVLMVETHNEIYDKFKQSTHSIYMFFNTSELREAVPEPVLLSRAELRLLRLKLKVEQHVELYQKYSNNSWRYLSNRLLAPSDSPEWLSFDVTGVVRQWLSRGGEIEGFRLSAHCSCDSRDNTLQVDINGFTTGRRGDLATIHGMNRPFLLLMATPLERAQHLQSSRHRRALDTNYCFSSTEKNCCVRQLYIDFRKDLGWKWIHEPKGYHANFCLGPCPYIWSLDTQYSKVLALYNQHNPGASAAPCCVPQALEPLPIVYYVGRKPKVEQLSNMIVRSCKCS

SEQ ID NO: 4493 - protein, 619 aa, Homo sapiens
MFVPRSLKIKRNANDDGKSCVAKIIKPDPEDLQLDKSRDVPVDAVATEAATIDRHISESCPFPSPGGQLAEVHSVSPEQGAKDSHPSEEPVKSFSKTQRWAEPGEPICVVCGRYGEYICDKTDEDVCSLECKAKHLLQVKEKEEKSKLSNPQKADSEPESPLNASYVYKEHPFILNLQEDQIENLKQQLGILVQGQEVTRPIIDFEHCSLPEVLNHNLKKSGYEVPTPIQMQMIPVGLLGRDILASADTGSGKTAAFLLPVIMRALFESKTPSALILTPTRELAIQIERQAKELMSGLPRMKTVLLVGGLPLPPQLYRLQQHVKVIIATPGRLLDIIKQSSVELCGVKIVVVDEADTMLKMGFQQQVLDILENIPNDCQTILVSATIPTSIEQLASQLLHNPVRIITGEKNLPCANVRQIILWVEDPAKKKKLFEILNDKKLFKPPVLVFVDCKLGADLLSEAVQKITGLKRISIHSEKSQIERKNILKGLLEGDYEVVVSTGVLGRGLDLISVRLVVNFDMPSSMDEYVHQIGRVGRLGQNGTAITFINNNSKRLFWDIAKRVKPTGSILPPQLLNSPYLHDQKRKEQQKDKQTQNDLVTGANLMDIIRKHDKSNSQK

SEQ ID NO: 4494 - protein, 580 aa, Homo sapiens
MFVPRSLKIKRNANDDGKSCVAKIIKPDPEDLQLDKSRDVPVDAVATEAATIDRHISESCPFPSPGGQLAEVHSVSPEQGAKDSHPSEEPVKSFSKTQRWAEPGEPICVVCGRYGEYICDKTDEDVCSLECKAKHLLQVKEKEEKSKLSNPQKADSEPESPLNASYVYKEHPFILNLQEDQIENLKQQLGILVQGQEVTRPIIDFEHCSLPEVLNHNLKKSGYEVPTPIQMQMIPVGLLGRDILASADTGSGKTAAFLLPVIMRALFESKTPSALILTPTRELAIQIERQAKELMSGLPRMKTVLLVGGLPLPPQLYRLQQHVKVIIATPGRLLDIIKQSSVELCGVKIVVVDEADTMLKMGFQQQVLDILENIPNDCQTILVSATIPTSIEQLASQLLHNPVRIITGEKNLPCANVRQIILWVEDPAKKKKLFEILNDKKLFKPPVLVFVDCKLGADLLSEAVQKITGLKSISIHSEKSQIERKNILKGLLEGDYEVVVSTGVLGRGLDLISVRLVVNFDMPSSMDEYVHQENTYKSTWRNPQHFQQDVRMTLGYVGKAQWEEDNQLKVKLGLKKNCSS

SEQ ID NO: 4495 - protein, 190 aa, Homo sapiens
MNPQIRNPMKAMYPGTFYFQFKNLWEANDRNETWLCFTVEGIKRRSVVSWKTGVFRNQVDSETHCHAERCFLSWFCDDILSPNTKYQVTWYTSWSPCPDCAGEVAEFLARHSNVNLTIFTARLYYFQYPCYQEGLRSLSQEGVAVEIMDYEDFKYCWENFVYNDNEPFKPWKGLKTNFRLLKRRLRESLQ

SEQ ID NO: 4496 - protein, 106 aa, Homo sapiens
MFAPAVMRAFRKNKTLGYGVPMLLLIVGGSFGLREFSQIRYDAVKSKMDPELEKKLKENKISLESEYEKIKDSKFDDWKNIRGPRPWEDPDLLQGRNPESLKTKTT

SEQ ID NO: 4497 - protein, 228 aa, Homo sapiens
MEPASCCAERPKPGPTGVKTKPSCGGWRAVGLLLLLLLLVLAAVGIVAGGLLGSAQGPPKPRLQTLRMTLPSPHMPRPNQTILVDVARNAATITVTPPQSNHSWAVLFDGQSGCICYRPEEHQVCFLRLMEDSDRETLRLLVDTSKVQEAWVPSQDTHHTQELLAVQGSLEVDPAQAGALVQRLCMRTPIYWARRAEGPRRQRLIYLCIDICFPSNICVSVCFYYLPD

SEQ ID NO: 4498 - protein, 464 aa, Homo sapiens
MDFQHRPGGKTGSGGVASSSESNRDRRERLRQLALETIDINKDPYFMKNHLGSYECKLCLTLHNNEGSYLAHTQGKKHQTNLARRAAKEAKEAPAQPAPEKVKVEVKKFVKIGRPGYKVTKQRDSEMGQQSLLFQIDYPEIAEGIMPRHRFMSAYEQRIEPPDRRWQYLLMAAEPYETIAFKVPSREIDKAEGKFWTHWNRETKQFFLQFHFKMEKPPAPPSLPAGPPGVKRPPPPLMNGLPPRPPLPESLPPPPPGGLPLPPMPPTGPAPSGPPGPPQLPPPAPGVHPPAPVVHPPASGVHPPAPGVHPPAPGVHPPAPGVHPPTSGVHPPAPGVHPPAPGVHPPAPGVHPPAPGVHPPAPGVHPPPSAGVHPQAPGVHPAAPAVHPQAPGVHPPAPGMHPQAPGVHPQPPGVHPSAPGVHPQPPGVHPSNPGVHPPTPMPPMLRPPLPSEGPGNIPPPPPTN

SEQ ID NO: 4499 - protein, 377 aa, Homo sapiens
MAAAAQSRVVRVLSMSRSAITAIATSVCHGPPCRQLHHALMPHGKGGRSSVSGIVATVFGATGFLGRYVVNHLGRMGSQVIIPYRCDKYDIMHLRPMGDLGQLLFLEWDARDKDSIRRVVQHSNVVINLIGRDWETKNFDFEDVFVKIPQAIAQLSKEAGVEKFIHVSHLNANIKSSSRYLRNKAVGEKVVRDAFPEAIIVKPSDIFGREDRFLNSFASMHRFGPIPLGSLGWKTVKQPVYVVDVSKGIVNAVKDPDANGKSFAFVGPSRYLLFHLVKYIFAVAHRLFLPFPLPLFAYRWVARVFEISPFEPWITRDKVERMHITDMKLPHLPGLEDLGIQATPLELKAIEVLRRHRTYRWLSAEIEDVKPAKTVNI

SEQ ID NO: 4500 - protein, 1180 aa, Homo sapiens
MSADSSPLVGSTPTGYGTLTIGTSIDPLSSSVSSVRLSGYCGSPWRVIGYHVVVWMMAGIPLLLFRWKPLWGVRLRLRPCNLAHAETLVIEIRDKEDSSWQLFTVQVQTEAIGEGSLEPSPQSQAEDGRSQAAVGAVPEGAWKDTAQLHKSEEAVSVGQKRVLRYYLFQGQRYIWIETQQAFYQVSLLDHGRSCDDVHRSRHGLSLQDQMVRKAIYGPNVISIPVKSYPQLLVDEALNPYYGFQAFSIALWLADHYYWYALCIFLISSISICLSLYKTRKQSQTLRDMVKLSMRVCVCRPGGEEEWVDSSELVPGDCLVLPQEGGLMPCDAALVAGECMVNESSLTGESIPVLKTALPEGLGPYCAETHRRHTLFCGTLILQARAYVGPHVLAVVTRTGFCTAKGGLVSSILHPRPINFKFYKHSMKFVAALSVLALLGTIYSIFILYRNRVPLNEIVIRALDLVTVVVPPALPAAMTVCTLYAQSRLRRQGIFCIHPLRINLGGKLQLVCFDKTGTLTEDGLDVMGVVPLKGQAFLPLVPEPRRLPVGPLLRALATCHALSRLQDTPVGDPMDLKMVESTGWVLEEEPAADSAFGTQVLAVMRPPLWEPQLQAMEEPPVPVSVLHRFPFSSALQRMSVVVAWPGATQPEAYVKGSPELVAGLCNPETVPTDFAQMLQSYTAAGYRVVALASKPLPTVPSLEAAQQLTRDTVEGDLSLLGLLVMRNLLKPQTTPVIQALRRTRIRAVMVTGDNLQTAVTVARGCGMVAPQEHLIIVHATHPERGQPASLEFLPMESPTAVNGVKDPDQAASYTVEPDPRSRHLALSGPTFGIIVKHFPKLLPKVLVQGTVFARMAPEQKTELVCELQKLQYCVGMCGDGANDCGALKAADVGISLSQAEASVVSPFTSSMASIECVPMVIREGRCSLDTSFSVFKYMALYSLTQFISVLILYTINTNLGDLQFLAIDLVITTTVAVLMSRTGPALVLGRVRPPGALLSVPVLSSLLLQMVLVTGVQLGGYFLTLAQPWFVPLNRTVAAPDNLPNYENTVVFSLSSFQYLILAAAVSKGAPFRRPLYTNVPFLVALALLSSVLVGLVLVPGLLQGPLALRNITDTGFKLLLLGLVTLNFVGAFMLESVLDQCLPACLRRLRPKRASKKRFKQLERELAEQPWPPLPAGPLR

SEQ ID NO: 4501 - protein, 352 aa, Homo sapiens
MARGRKMSKPRAVEAAAAAAAVAATAPGPEMVERRGPGRPRTDGENVFTGQSKIYSYMSPNKCSGMRFPLQEENSVTHHEVKCQGKPLAGIYRKREEKRNAGNAVRSAMKSEEQKIKDARKGPLVPFPNQKSEAAEPPKTPPSSCDSTNAAIAKQALKKPIKGKQAPRKKAQGKTQQNRKLTDFYPVRRSSRKSKAELQSEERKRIDELIESGKEEGMKIDLIDGKGRGVIATKQFSRGDFVVEYHGDLIEITDAKKREALYAQDPSTGCYMYYFQYLSKTYCVDATRETNRLGRLINHSKCGNCQTKLHDIDGVPHLILIASRDIAAGEELLYDYGDRSKASIEAHPWLKH

SEQ ID NO: 4502 - protein, 388 aa, Homo sapiens
MGAAAWARPLSVSFLLLLLPLPGMPAGSWDPAGYLLYCPCMGRFGNQADHFLGSLAFAKLLNRTLAVPPWIEYQHHKPPFTNLHVSYQKYFKLEPLQAYHRVISLEDFMEKLAPTHWPPEKRVAYCFEVAAQRSPDKKTCPMKEGNPFGPFWDQFHVSFNKSELFTGISFSASYREQWSQRFSPKEHPVLALPGAPAQFPVLEEHRPLQKYMVWSDEMVKTGEAQIHAHLVRPYVGIHLRIGSDWKNACAMLKDGTAGSHFMASPQCVGYSRSTAAPLTMTMCLPDLKEIQRAVKLWVRSLDAQSVYVATDSESYVPELQQLFKGKVKVVSLKPEVAQVDLYILGQADHFIGNCVSSFTAFVKRERDLQGRPSSFFGMDRPPKLRDEF

SEQ ID NO: 4503 - protein, 194 aa, Homo sapiens
MGAAAWARPLSVSFLLLLLPLPGMPAGSWDPAGYLLYCPCMGRFGNQADHFLGSLAFAKLLNRTLAVPPWIEYQHHKPPFTNLHVSYQKYFKLEPLQAYHRVISLEDFMEKLAPTHWPPEKRVAYCFEVAAQRSPDKKTCPMKEGNPFGPFWDQFHVSFNKSELFTGISFSASYREQWSQRRENHSCVTLLFPR

SEQ ID NO: 4504 - protein, 979 aa, Homo sapiens
MSPLKIHGPIRIRSMQTGITKWKEGSFEIVEKENKVSLVVHYNTGGIPRIFQLSHNIKNVVLRPSGAKQSRLMLTLQDNSFLSIDKVPSKDAEEMRLFLDAVHQNRLPAAMKPSQGSGSFGAILGSRTSQKETSRQLSYSDNQASAKRGSLETKDDIPFRKVLGNPGRGSIKTVAGSGIARTIPSLTSTSTPLRSGLLENRTEKRKRMISTGSELNEDYPKENDSSSNNKAMTDPSRKYLTSSREKQLSLKQSEENRTSGLLPLQSSSFYGSRAGSKEHSSGGTNLDRTNVSSQTPSAKRSLGFLPQPVPLSVKKLRCNQDYTGWNKPRVPLSSHQQQQLQGFSKLGNTCYMNAILQSLFSLQSFANDLLKQGIPWKKIPLNALIRRFAHLLVKKDICNSETKKDLLKKVKNAISATAERFSGYMQNDAHEFLSQCLDQLKEDMEKLNKTWKTEPVSGEENSPDISATRAYTCPVITNLEFEVQHSIICKACGEIIPKREQFNDLSIDLPRRKKPLPPRSIQDSLDLFFRAEELEYSCEKCGGKCALVRHKFNRLPRVLILHLKRYSFNVALSLNNKIGQQVIIPRYLTLSSHCTENTKPPFTLGWSAHMAISRPLKASQMVNSCITSPSTPSKKFTFKSKSSLALCLDSDSEDELKRSVALSQRLCEMLGNEQQQEDLEKDSKLCPIEPDKSELENSGFDRMSEEELLAAVLEISKRDASPSLSHEDDDEPTSSPDTGFAEDDIQEMPENPDTMETEKPKTITELDPASFTEITKDCDENKENKTPEGSQGEVDWLQQYDMEREREEQELQQALAQSLQEQEAWEQKEDDDLKRATELSLQEFNNSFVDALGSDEDSGNEDVFDMEYTEAEAEELKRNAETGNLPHSYRLISVVSHIGSTSSSDHYISDVYDIKKQAWFTYNDLEVSKIQEAAVQSDRDRSGYIFFYMHKEIFDELLETEKNSQSLSTEVGKTTRQAS

SEQ ID NO: 4505 - protein, 2286 aa, Homo sapiens
MSLRSGGRRRADPGADGEASRDDGATSSVSALKRLERSQWTDKMDLRFGFERLKEPGEKTGWLINMHPTEILDEDKRLGSAVDYYFIQDDGSRFKVALPYKPYFYIATRKGCEREVSSFLSKKFQGKIAKVETVPKEDLDLPNHLVGLKRNYIRLSFHTVEDLVKVRKEISPAVKKNREQDHASDAYTALLSSVLQRGGVITDEEETSKKIADQLDNIVDMREYDVPYHIRLSIDLKIHVAHWYNVRYRGNAFPVEITRRDDLVERPDPVVLAFDIETTKLPLKFPDAETDQIMMISYMIDGQGYLITNREIVSEDIEDFEFTPKPEYEGPFCVFNEPDEAHLIQRWFEHVQETKPTIMVTYNGDFFDWPFVEARAAVHGLSMQQEIGFQKDSQGEYKAPQCIHMDCLRWVKRDSYLPVGSHNLKAAAKAKLGYDPVELDPEDMCRMATEQPQTLATYSVSDAVATYYLYMKYVHPFIFALCTIIPMEPDEVLRKGSGTLCEALLMVQAFHANIIFPNKQEQEFNKLTDDGHVLDSETYVGGHVEALESGVFRSDIPCRFRMNPAAFDFLLQRVEKTLRHALEEEEKVPVEQVTNFEEVCDEIKSKLASLKDVPSRIECPLIYHLDVGAMYPNIILTNRLQPSAMVDEATCAACDFNKPGANCQRKMAWQWRGEFMPASRSEYHRIQHQLESEKFPPLFPEGPARAFHELSREEQAKYEKRRLADYCRKAYKKIHITKVEERLTTICQRENSFYVDTVRAFRDRRYEFKGLHKVWKKKLSAAVEVGDAAEVKRCKNMEVLYDSLQLAHKCILNSFYGYVMRKGARWYSMEMAGIVCFTGANIITQARELIEQIGRPLELDTDGIWCVLPNSFPENFVFKTTNVKKPKVTISYPGAMLNIMVKEGFTNDQYQELAEPSSLTYVTRSENSIFFEVDGPYLAMILPASKEEGKKLKKRYAVFNEDGSLAELKGFEVKRRGELQLIKIFQSSVFEAFLKGSTLEEVYGSVAKVADYWLDVLYSKAANMPDSELFELISENRSMSRKLEDYGEQKSTSISTAKRLAEFLGDQMVKDAGLSCRYIISRKPEGSPVTERAIPLAIFQAEPTVRKHFLRKWLKSSSLQDFDIRAILDWDYYIERLGSAIQKIITIPAALQQVKNPVPRVKHPDWLHKKLLEKNDVYKQKKISELFTLEGRRQVTMAEASEDSPRPSAPDMEDFGLVKLPHPAAPVTVKRKRVLWESQEESQDLTPTVPWQEILGQPPALGTSQEEWLVWLRFHKKKWQLQARQRLARRKRQRLESAEGVLRPGAIRDGPATGLGSFLRRTARSILDLPWQIVQISETSQAGLFRLWALVGSDLHCIRLSIPRVFYVNQRVAKAEEGASYRKVNRVLPRSNMVYNLYEYSVPEDMYQEHINEINAELSAPDIEGVYETQVPLLFRALVHLGCVCVVNKQLVRHLSGWEAETFALEHLEMRSLAQFSYLEPGSIRHIYLYHHAQAHKALFGIFIPSQRRASVFVLDTVRSNQMPSLGALYSAEHGLLLEKVGPELLPPPKHTFEVRAETDLKTICRAIQRFLLAYKEERRGPTLIAVQSSWELKRLASEIPVLEEFPLVPICVADKINYGVLDWQRHGARRMIRHYLNLDTCLSQAFEMSRYFHIPIGNLPEDISTFGSDLFFARHLQRHNHLLWLSPTARPDLGGKEADDNCLVMEFDDQATVEINSSGCYSTVCVELDLQNLAVNTILQSHHVNDMEGADSMGISFDVIQQASLEDMITGGQAASAPASYDETALCSNTFRILKSMVVGWVKEITQYHNIYADNQVMHFYRWLRSPSSLLHDPALHRTLHNMMKKLFLQLIAEFKRLGSSVIYANFNRIILCTKKRRVEDAIAYVEYITSSIHSKETFHSLTISFSRCWEFLLWMDPSNYGGIKGKVSSRIHCGLQDSQKAGGAEDEQENEDDEEERDGEEEEEAEESNVEDLLENNWNILQFLPQAASCQNYFLMIVSAYIVAVYHCMKDGLRRSAPGSTPVRRRGASQLSQEAEGAVGALPGMITFSQDYVANELTQSFFTITQKIQKKVTGSRNSTELSEMFPVLPGSHLLLNNPALEFIKYVCKVLSLDTNITNQVNKLNRDLLRLVDVGEFSEEAQFRDPCRSYVLPEVICRSCNFCRDLDLCKDSSFSEDGAVLPQWLCSNCQAPYDSSAIEMTLVEVLQKKLMAFTLQDLVCLKCRGVKETSMPVYCSCAGDFALTIHTQVFMEQIGIFRNIAQHYGMSYLLETLEWLLQKNPQLGH

SEQ ID NO: 4506 - protein, 607 aa, Homo sapiens
MESCSVAQAGVQWPDLSSLQPPPPRFKQFSCHSLQVAGITDLDLQCEIISYIEVPTYETDISSTQLQSIYKREKLYECKKCQKKFSSGYQLILHHRFHVIERPYECKECGKNFRSGYQLTLHQRFHTGEKPYECTECGKNFRSGYQLTVHQRFHTGEKTYECRQCGKAFIYASHIVQHERIHTGGKPYECQECGRAFSQGGHLRIHQRVHTGEKPYKCKECGKTFSRRSNLVEHGQFHTDEKPYICEKCGKAFRRGHQLTVHQRVHTGKKPYECKECGKGYTTASYFLLHQRIHKGGKPYECKECKKTFTLYRNLTRHQNIHTGEKLFECKQCGKTYTTGSKLFQHQKTHTGEKPYECKECGKAFSLYGYLKQHQKIHTGMKHFECKECKKTFTLYRNLTRHQNIHTGKKLFECQECGKAYSTGSNLIQHRKTHTGEKPYKCKECGKTFSLHGYLNQHQKIHTGVKPYECKVCRKTFTFYRNLTLHQSIHTDEKPFECKECGKTFRRSSHLTAHQSIHADKKPYECKECGKAFKMYGYLTQHQKIHTGGKPYECKECGKAFSRASNLVQHERIHTGEKPYVCKQCGKTFRYGSALKAHQRIHRSIKV

SEQ ID NO: 4507 - protein, 177 aa, Homo sapiens
MNPAEVVKQRMQMYNSPYHRVTDCVRAVWQNEGAGAFYRSYTTQLTMNVPFQAIHFMTYEFLQEHFNPQRRYNPSSHVLSGACAGAVAAAATTPLDVCKTLLNTQESLALNSHITGHITGMASAFRTVYQVGGVTAYFRGVQARVIYQIPSTAIAWSVYEFFKYLITKRQEEWRAGK

SEQ ID NO: 4508 - protein, 125 aa, Homo sapiens
MAKYLAQIIVMGVQVVGRAFARALRQEFAASRAAADARGRAGHRSAAASNLSGLSLQEAQQILNVSKLSPEEVQKNYEHLFKVNDKSVGGSFYLQSKVVRAKERLDEELKIQAQEDREKGQMPHT

SEQ ID NO: 4509 - protein, 433 aa, Homo sapiens
MGRVQLFEISLSHGRVVYSPGEPLAGTVRVRLGAPLPFRAIRVTCIGSCGVSNKANDTAWVVEEGYFNSSLSLADKGSLPAGEHSFPFQFLLPATAPTSFEGPFGKIVHQVRAAIHTPRFSKDHKCSLVFYILSPLNLNSIPDIEQPNVASATKKFSYKLVKTGSVVLTASTDLRGYVVGQALQLHADVENQSGKDTSPVVASLLQKVSYKAKRWIHDVRTIAEVEGAGVKAWRRAQWHEQILVPALPQSALPGCSLIHIDYYLQVSLKAPEATVTLPVFIGNIAVNHAPVSPRPGLGLPPGAPPLVVPSAPPQEEAEAEAAAGGPHFLDPVFLSTKSHSQRQPLLATLSSVPGAPEPCPQDGSPASHPLHPPLCISTGATVPYFAEGSGGPVPTTSTLILPPEYSSWGYPYEAPPSYEQSCGGVEPSLTPES

SEQ ID NO: 4510 - protein, 2351 aa, Homo sapiens
MQIELSTCFFLCLLRFCFSATRRYYLGAVELSWDYMQSDLGELPVDARFPPRVPKSFPFNTSVVYKKTLFVEFTDHLFNIAKPRPPWMGLLGPTIQAEVYDTVVITLKNMASHPVSLHAVGVSYWKASEGAEYDDQTSQREKEDDKVFPGGSHTYVWQVLKENGPMASDPLCLTYSYLSHVDLVKDLNSGLIGALLVCREGSLAKEKTQTLHKFILLFAVFDEGKSWHSETKNSLMQDRDAASARAWPKMHTVNGYVNRSLPGLIGCHRKSVYWHVIGMGTTPEVHSIFLEGHTFLVRNHRQASLEISPITFLTAQTLLMDLGQFLLFCHISSHQHDGMEAYVKVDSCPEEPQLRMKNNEEAEDYDDDLTDSEMDVVRFDDDNSPSFIQIRSVAKKHPKTWVHYIAAEEEDWDYAPLVLAPDDRSYKSQYLNNGPQRIGRKYKKVRFMAYTDETFKTREAIQHESGILGPLLYGEVGDTLLIIFKNQASRPYNIYPHGITDVRPLYSRRLPKGVKHLKDFPILPGEIFKYKWTVTVEDGPTKSDPRCLTRYYSSFVNMERDLASGLIGPLLICYKESVDQRGNQIMSDKRNVILFSVFDENRSWYLTENIQRFLPNPAGVQLEDPEFQASNIMHSINGYVFDSLQLSVCLHEVAYWYILSIGAQTDFLSVFFSGYTFKHKMVYEDTLTLFPFSGETVFMSMENPGLWILGCHNSDFRNRGMTALLKVSSCDKNTGDYYEDSYEDISAYLLSKNNAIEPRSFSQNSRHPSTRQKQFNATTIPENDIEKTDPWFAHRTPMPKIQNVSSSDLLMLLRQSPTPHGLSLSDLQEAKYETFSDDPSPGAIDSNNSLSEMTHFRPQLHHSGDMVFTPESGLQLRLNEKLGTTAATELKKLDFKVSSTSNNLISTIPSDNLAAGTDNTSSLGPPSMPVHYDSQLDTTLFGKKSSPLTESGGPLSLSEENNDSKLLESGLMNSQESSWGKNVSSTESGRLFKGKRAHGPALLTKDNALFKVSISLLKTNKTSNNSATNRKTHIDGPSLLIENSPSVWQNILESDTEFKKVTPLIHDRMLMDKNATALRLNHMSNKTTSSKNMEMVQQKKEGPIPPDAQNPDMSFFKMLFLPESARWIQRTHGKNSLNSGQGPSPKQLVSLGPEKSVEGQNFLSEKNKVVVGKGEFTKDVGLKEMVFPSSRNLFLTNLDNLHENNTHNQEKKIQEEIEKKETLIQENVVLPQIHTVTGTKNFMKNLFLLSTRQNVEGSYDGAYAPVLQDFRSLNDSTNRTKKHTAHFSKKGEEENLEGLGNQTKQIVEKYACTTRISPNTSQQNFVTQRSKRALKQFRLPLEETELEKRIIVDDTSTQWSKNMKHLTPSTLTQIDYNEKEKGAITQSPLSDCLTRSHSIPQANRSPLPIAKVSSFPSIRPIYLTRVLFQDNSSHLPAASYRKKDSGVQESSHFLQGAKKNNLSLAILTLEMTGDQREVGSLGTSATNSVTYKKVENTVLPKPDLPKTSGKVELLPKVHIYQKDLFPTETSNGSPGHLDLVEGSLLQGTEGAIKWNEANRPGKVPFLRVATESSAKTPSKLLDPLAWDNHYGTQIPKEEWKSQEKSPEKTAFKKKDTILSLNACESNHAIAAINEGQNKPEIEVTWAKQGRTERLCSQNPPVLKRHQREITRTTLQSDQEEIDYDDTISVEMKKEDFDIYDEDENQSPRSFQKKTRHYFIAAVERLWDYGMSSSPHVLRNRAQSGSVPQFKKVVFQEFTDGSFTQPLYRGELNEHLGLLGPYIRAEVEDNIMVTFRNQASRPYSFYSSLISYEEDQRQGAEPRKNFVKPNETKTYFWKVQHHMAPTKDEFDCKAWAYFSDVDLEKDVHSGLIGPLLVCHTNTLNPAHGRQVTVQEFALFFTIFDETKSWYFTENMERNCRAPCNIQMEDPTFKENYRFHAINGYIMDTLPGLVMAQDQRIRWYLLSMGSNENIHSIHFSGHVFTVRKKEEYKMALYNLYPGVFETVEMLPSKAGIWRVECLIGEHLHAGMSTLFLVYSNKCQTPLGMASGHIRDFQITASGQYGQWAPKLARLHYSGSINAWSTKEPFSWIKVDLLAPMIIHGIKTQGARQKFSSLYISQFIIMYSLDGKKWQTYRGNSTGTLMVFFGNVDSSGIKHNIFNPPIIARYIRLHPTHYSIRSTLRMELMGCDLNSCSMPLGMESKAISDAQITASSYFTNMFATWSPSKARLHLQGRSNAWRPQVNNPKEWLQVDFQKTMKVTGVTTQGVKSLLTSMYVKEFLISSSQDGHQWTLFFQNGKVKVFQGNQDSFTPVVNSLDPPLLTRYLRIHPQSWVHQIALRMEVLGCEAQDLY

SEQ ID NO: 4511 - protein, 216 aa, Homo sapiens
MRIQDPGKVFFGNVDSSGIKHNIFNPPIIARYIRLHPTHYSIRSTLRMELMGCDLNSCSMPLGMESKAISDAQITASSYFTNMFATWSPSKARLHLQGRSNAWRPQVNNPKEWLQVDFQKTMKVTGVTTQGVKSLLTSMYVKEFLISSSQDGHQWTLFFQNGKVKVFQGNQDSFTPVVNSLDPPLLTRYLRIHPQSWVHQIALRMEVLGCEAQDLY

SEQ ID NO: 4512 - protein, 2612 aa, Homo sapiens
MADVDPDTLLEWLQMGQGDERDMQLIALEQLCMLLLMSDNVDRCFETCPPRTFLPALCKIFLDESAPDNVLEVTARAITYYLDVSAECTRRIVGVDGAIKALCNRLVVVELNNRTSRDLAEQCVKVLELICTRESGAVFEAGGLNCVLTFIRDSGHLVHKDTLHSAMAVVSRLCGKMEPQDSSLEICVESLSSLLKHEDHQVSDGALRCFASLADRFTRRGVDPAPLAKHGLTEELLSRMAAAGGTVSGPSSACKPGRSTTGAPSTTADSKLSNQVSTIVSLLSTLCRGSPVVTHDLLRSELPDSIESALQGDERCVLDTMRLVDLLLVLLFEGRKALPKSSAGSTGRIPGLRRLDSSGERSHRQLIDCIRSKDTDALIDAIDTGAFEVNFMDDVGQTLLNWASAFGTQEMVEFLCERGADVNRGQRSSSLHYAACFGRPQVAKTLLRHGANPDLRDEDGKTPLDKARERGHSEVVAILQSPGDWMCPVNKGDDKKKKDTNKDEEECNEPKGDPEMAPIYLKRLLPVFAQTFQQTMLPSIRKASLALIRKMIHFCSEALLQEVCDSDVGHNLPTILVEITATVLDQEDDDDGHLLALQIIRDIVDKGGDIYKHQLARLGVISKVSTLAGPSSDDENEEESKPEKEDEPQEDAQELQQGKPYHWRDWSIIRGRDCLYIWSDAAALELSNGSNGWFRFILDGKLATMYSSGSPEGGSDSSESRSEFLEKLQRARGQVKPSTSSQPILSAPGPTKLTVGNWSLTCLKEGEIAIHNSDGQQATILKEDLPGFVFESNRGTKHSFTAETSLGSEFVTGWTGKRGRKLKSKLEKTKQKVRTMARDLYDDHFKAVESMPRGVVVTLRNIATQLESSWELHTNRQCIESENTWRDLMKTALKNLIVLLKDENTISPYEMCSSGLVQALLTVLNNVSIFRATKQKQNEVPKVILSVFKTAFTENEDDESRPAVALIRKLIAVLESIERLPLHLYDTPGSTYNLQILTRRLRFRLERAPGETALIDRTGRMLKMEPLATVESLEQYLLKMVAKQWYDFDRSSFVFVRKLREGQNFIFRHQHDFDENGIIYWIGTNAKTAYEWVNPAAYGLVVVTSSEGRNLPYGRLEDILSRDNSALNCHSNDDKNAWFAIDLGLWVIPSAYTLRHARGYGRSALRNWVFQVSKDGQNWTSLYTHVDDCSLNEPGSTATWPLDPPKDEKQGWRHVRIKQMGKNASGQTHYLSLSGFELYGTVNGVCEDQLGKAAKEAEANLRRQRRLVRSQVLKYMVPGARVIRGLDWKWRDQDGSPQGEGTVTGELHNGWIDVTWDAGGSNSYRMGAEGKFDLKLAPGYDPDTVASPKPVSSTVSGTTQSWSSLVKNNCPDKTSAAAGSSSRKGSSSSVCSVASSSDISLGSTKTERRSEIVMEHSIVSGADVHEPIVVLSSAENVPQTEVGSSSSASTSTLTAETGSENAERKLGPDSSVRTPGESSAISMGIVSVSSPDVSSVSELTNKEAASQRPLSSSASNRLSVSSLLAAGAPMSSSASVPNLSSRETSSLESFVRRVANIARTNATNNMNLSRSSSDNNTNTLGRNVMSTATSPLMGAQSFPNLTTPGTTSTVTMSTSSVTSSSNVATATTVLSVGQSLSNTLTTSLTSTSSESDTGQEAEYSLYDFLDSCRASTLLAELDDDEDLPEPDEEDDENEDDNQEDQEYEEVMILRRPSLQRRAGSRSDVTHHAVTSQLPQVPAGAGSRPIGEQEEEEYETKGGRRRTWDDDYVLKRQFSALVPAFDPRPGRTNVQQTTDLEIPPPGTPHSELLEEVECTPSPRLALTLKVTGLGTTREVELPLTNFRSTIFYYVQKLLQLSCNGNVKSDKLRRIWEPTYTIMYREMKDSDKEKENGKMGCWSIEHVEQYLGTDELPKNDLITYLQKNADAAFLRHWKLTGTNKSIRKNRNCSQLIAAYKDFCEHGTKSGLNQGAISTLQSSDILNLTKEQPQAKAGNGQNSCGVEDVLQLLRILYIVASDPYSRISQEDGDEQLQFTFPPDEFTSKKITTKILQQIEEPLALASGALPDWCEQLTSKCPFLIPFETRQLYFTCTAFGASRAIVWLQNRREATVERTRTTSSVRRDDPGEFRVGRLKHERVKVPRGESLMEWAENVMQIHADRKSVLEVEFLGEEGTGLGPTLEFYALVAAEFQRTDLGAWLCDDNFPDDESRHVDLGGGLKPPGYYVQRSCGLFTAPFPQDSDELERITKLFHFLGIFLAKCIQDNRLVDLPISKPFFKLMCMGDIKSNMSKLIYESRGDRDLHCTESQSEASTEEGHDSLSVGSFEEDSKSEFILDPPKPKPPAWFNGILTWEDFELVNPHRARFLKEIKDLAIKRRQILSNKGLSEDEKNTKLQELVLKNPSGSGPPLSIEDLGLNFQFCPSSRIYGFTAVDLKPSGEDEMITMDNAEEYVDLMFDFCMHTGIQKQMEAFRDGFNKVFPMEKLSSFSHEEVQMILCGNQSPSWAAEDIINYTEPKLGYTRDSPGFLRFVRVLCGMSSDERKAFLQFTTGCSTLPPGGLANLHPRLTVVRKVDATDASYPSVNTCVHYLKLPEYSSEEIMRERLLAATMEKGFHLN

SEQ ID NO: 4513 - protein, 384 aa, Homo sapiens
MAFLMKKKKFKFQTTFTLEELTAVPFVNGVLFCKVRLLDGGDFVSLSSREEVQENCVRWRKRFTFVCKMSANPATGLLDPCVFRVSVRKELKGGKAYSKLGFADLNLAEFAGSGSTVRCCLLEGYDTKNTRQDNSILKVTIGMFLLSGDPCFKTPPSTAKSISIPGQDSSLQLTCKGGGTSSGGSSTNSLTGSRPPKARPTILSSGLPEEPDQNLSSPEEVFHSGHSRNSSYASQQSKISGYSTEHSRSSSLSDLTHRRNTSTSSSASGGLGMTVEGPEGSEREHRPPEKPPRPPRPLHLSDRSFRRKKDSVESHPTWVDDTRIDADAIVEKIVQSQDFTDGSNTEDSNLRLFVSRDGSATLSGIQLATRVSSGVYEPVVIESH

SEQ ID NO: 4514 - protein, 242 aa, Homo sapiens
MFLLSGDPCFKTPPSTAKSISIPGQDSSLQLTCKGGGTSSGGSSTNSLTGSRPPKARPTILSSGLPEEPDQNLSSPEEVFHSGHSRNSSYASQQSKISGYSTEHSRSSSLSDLTHRRNTSTSSSASGGLGMTVEGPEGSEREHRPPEKPPRPPRPLHLSDRSFRRKKDSVESHPTWVDDTRIDADAIVEKIVQSQDFTDGSNTEDSNLRLFVSRDGSATLSGIQLATRVSSGVYEPVVIESH

SEQ ID NO: 4515 - protein, 179 aa, Homo sapiens
MKGGSRVSNPAVMAQEEEDVRDYNLTEEQKAIKAKYPPVNRKYEYLDHTADVQLHAWGDTLEEAFEQCAMAMFGYMTDTGTVEPLQTVEVETQGDDLQSLLFHFLDEWLYKFSADEFFIPREVKVLSIDQRNFKLRSIGWGEEFSLSKHPQGTEVKAITYSAMQVYNEENPEVFVIIDI

SEQ ID NO: 4516 - protein, 188 aa, Homo sapiens [sequence omitted]

SEQ ID NO: 4517 - protein, 189 aa, Homo sapiens [sequence omitted]

SEQ ID NO: 4518 - protein, 418 aa, Homo sapiens
MAGRLPACVVDCGTGYTKLGYAGNTEPQFIIPSCIAIKESAKVGDQAQRRVMKGVDDLDFFIGDEAIEKPTYATKWPIRHGIVEDWDLMERFMEQVIFKYLRAEPEDHYFLLTEPPLNTPENREYTAEIMFESFNVPGLYIAVQAVLALAASWTSRQVGERTLTGTVIDSGDGVTHVIPVAEGYVIGSCIKHIPIAGRDITYFIQQLLRDREVGIPPEQSLETAKAVKERYSYVCPDLVKEFNKYDTDGSKWIKQYTGINAISKKEFSIDVGYERFLGPEIFFHPEFANPDFTQPISEVVDEVIQNCPIDVRRPLYKNIVLSGGSTMFRDFGRRLQRDLKRTVDARLKLSEELSGGRLKPKPIDVQVITHHMQRYAVWFGGSMLASTPEFYQVCHTKKDYEEIGPSICRHNPVFGVMS

SEQ ID NO: 4519 - protein, 690 aa, Homo sapiens
MQPPPRKVKPAQEVKLRFLEQLSILQTWQQREADLLEDIRSYSKQRAAIEREYGQALQKLAGPFLKREGHRSGEMDSRGRTVFGAWRCLLDATVAGGQTRLQASDRYRDLAGGTGRSAKEQVLRKGTENLQRAQAEVLQSVRELSRSRKLYGQRERVWALAQEKAADVQARLNRSDHGIFHSRTSLQKLSTKLSAQSAQYSQQLQAARNEYLLNLVATNAHLDHYYQEELPALLKALVSELSEHLRDPLTSLSHTELEAAEVILEHAHRGEQTTSQVSWEQDLKLFLQEPGVFSPTPPQQFQPAGTDQVCVLEWGAEGVAGKSGLEKEVQRLTSRAARDYKIQNHGHRVLQRLEQRRQQASEREAPSIEQRLQEVRESIRRAQVSQVKGAARLALLQGAGLDVERWLKPAMTQAQDEVEQERRLSEARLSQRDLSPTAEDAELSDFEECEETGELFEEPAPQALATRALPCPAHVVFRYQAGREDELTITEGEWLEVIEEGDADEWVKARNQHGEVGFVPERYLNFPDLSLPESSQDSDNPCGAEPTAFLAQALYSYTGQSAEELSFPEGALIRLLPRAQDGVDDGFWRGEFGGRVGVFPSLLVEELLGPPGPPELSDPEQMLPSPSPPSFSPPAPTSVLDGPPAPVLPGDKALDFPGFLDMMAPRLRPMRPPPPPPAKAPDPGHPDPLT

SEQ ID NO: 4520 - protein, 255 aa, Homo sapiens
MSSIGTGYDLSASTFSPDGRVFQVEYAMKAVENSSTAIGIRCKDGVVFGVEKLVLSKLYEEGSNKRLFNVDRHVGMAVAGLLADARSLADIAREEASNFRSNFGYNIPLKHLADRVAMYVHAYTLYSAVRPFGCSFMLGSYSVNDGAQLYMIDPSGVSYGYWGCAIGKARQAAKTEIEKLQMKEMTCRDIVKEVAKIIYIVHDEVKDKAFELELSWVGELTNGRHEIVPKDIREEAEKYAKESLKEEDESDDDNM

SEQ ID NO: 4521 - protein, 248 aa, Homo sapiens
MSSIGTGYDLSASTFSPDGRVFQVEYAMKAVENSSTAIGIRCKDGVVFGVEKLVLSKLYEEGSNKRLFNVDRHVGMAVAGLLADARSLADIAREEASNFRSNFGYNIPLKHLADRVAMYVHAYTLYSAVRPFGCSVNDGAQLYMIDPSGVSYGYWGCAIGKARQAAKTEIEKLQMKEMTCRDIVKEVAKIIYIVHDEVKDKAFELELSWVGELTNGRHEIVPKDIREEAEKYAKESLKEEDESDDDNM

SEQ ID NO: 4522 - protein, 496 aa, Homo sapiens
MGRRALLLLLLSFLAPWATIALRPALRALGSLHLPTNPTSLPAVAKNYSVLYFQQKVDHFGFNTVKTFNQRYLVADKYWKKNGGSILFYTGNEGDIIWFCNNTGFMWDVAEELKAMLVFAEHRYYGESLPFGDNSFKDSRHLNFLTSEQALADFAELIKHLKRTIPGAENQPVIAIGGSYGGMLAAWFRMKYPHMVVGALAASAPIWQFEDLVPCGVFMKIVTTDFRKSGPHCSESIHRSWDAINRLSNTGSGLQWLTGALHLCSPLTSQDIQHLKDWISETWVNLAMVDYPYASNFLQPLPAWPIKVVCQYLKNPNVSDSLLLQNIFQALNVYYNYSGQVKCLNISETATSSLGTLGWSYQACTEVVMPFCTNGVDDMFEPHSWNLKELSDDCFQQWGVRPRPSWITTMYGGKNISSHTNIVFSNGELDPWSGGGVTKDITDTLVAVTISEGAHHLDLRTKNALDPMSVLLARSLEVRHMKNWIRDFYDSAGKQH

SEQ ID NO: 4523 - protein, 414 aa, Homo sapiens
MVDQYFSTLVMKGTLSGFVITRFMWDVAEELKAMLVFAEHRYYGESLPFGDNSFKDSRHLNFLTSEQALADFAELIKHLKRTIPGAENQPVIAIGGSYGGMLAAWFRMKYPHMVVGALAASAPIWQFEDLVPCGVFMKIVTTDFRKSGPHCSESIHRSWDAINRLSNTGSGLQWLTGALHLCSPLTSQDIQHLKDWISETWVNLAMVDYPYASNFLQPLPAWPIKVVCQYLKNPNVSDSLLLQNIFQALNVYYNYSGQVKCLNISETATSSLGTLGWSYQACTEVVMPFCTNGVDDMFEPHSWNLKELSDDCFQQWGVRPRPSWITTMYGGKNISSHTNIVFSNGELDPWSGGGVTKDITDTLVAVTISEGAHHLDLRTKNALDPMSVLLARSLEVRHMKNWIRDFYDSAGKQH

SEQ ID NO: 4524 - protein, 514 aa, Homo sapiens
MVWEVKTNQMPNAVQKLLLVMDKRASGMNDSLELLQCNENLPSSPGYNSCDEHMELDDLPELQAVQSDPTQSGMYQLSSDVSHQEYPRSSWNQNTSDIPETTYRENEVDWLTELANIATSPQSPLMQCSFYNRSSPVHIIATSKSLHSYARPPPVSSSSKSEPAFPHHHWKEETPVRHERANSESESGIFCMSSLSDDDDLGWCNSWPSTVWHCFLKGTRLCFHKGSNKEWQDVEDFARAEGCDNEEDLQMGIHKGYGSDGLKLLSHEESVSFGESVLKLTFDPGTVEDGLLTVECKLDHPFYVKNKGWSSFYPSLTVVQHGIPCCEVHIGDVCLPPGHPDAINFDDSGVFDTFKSYDFTPMDSSAVYVLSSMARQRRASLSCGGPGGQDFARSGFSKNCGSPGSSQLSSNSLYAKAVKNHSSGTVSATSPNKCKRPMNAFMLFAKKYRVEYTQMYPGKDNRAISVILGDRWKKMKNEERRMYTLEAKALAEEQKRLNPDCWKRKRTNSGSQQH

SEQ ID NO: 4525 - protein, 99 aa, Homo sapiens
MEPEQMLEGQTQVAENPHSEYGLTDNVERIVENEKINAEKSSKQKVDLQSLPTRAYLDQTVVPILLQGLAVLAKERPPNPIEFLASYLLKNKAQFEDRN

SEQ ID NO: 4526 - protein, 181 aa, Homo sapiens
MFKKFDEKENVSNCIQLKTSVIKGIKNQLIEQFPGIEPWLNQIMPKKDPVKIVRCHEHIEILTVNGELLFFRQREGPFYPTLRLLHKYPFILPHQQVDKGAIKFVLSGANIMCPGLTSPGAKLYPAAVDTIVAIMAEGKQHALCVGVMKMSAEDIEKVNKGIGIENIHYLNDGLWHMKTYK

SEQ ID NO: 4527 - protein, 261 aa, Homo sapiens
MSRRYDSRTTIFSPEGRLYQVEYAMEAIGHAGTCLGILANDGVLLAAERRNIHKLLDEVFFSEKIYKLNEDMACSVAGITSDANVLTNELRLIAQRYLLQYQEPIPCEQLVTALCDIKQAYTQFGGKRPFGVSLLYIGWDKHYGFQLYQSDPSGNYGGWKATCIGNNSAAAVSMLKQDYKEGEMTLKSALALAIKVLNKTMDVSKLSAEKVEIATLTRENGKTVIRVLKQKEVEQLIKKHEEEEAKAEREKKEKEQKEKDK

SEQ ID NO: 4528 - protein, 670 aa, Homo sapiens
MMEEEELEFVEELEAVLQLTPEVQLAIEQVFPSQDPLDRADFNAVEYINTLFPTEQSLANIDEVVNKIRLKIRRLDDNIRTVVRGQTNVGQDGRQVKEITRDIKQLDHAKRHLTTSITTLNHLHMLAGGVDSLEAMTRRRQYGEVANLLQGVMNVLEHFHKYMGIPQIRQLSERVKAAQTELGQQILADFEEAFPSQGTKRPGGPSNVLRDACLVANILDPRIKQEIIKKFIKQHLSEYLVLFQENQDVAWLDKIDRRYAWIKRQLVDYEEKYGRMFPREWCMAERIAVEFCHVTRAELAKIMRTRAKEIEVKLLLFAIQRTTNFEGFLAKRFSGCTLTDGTLKKLESPPPSTNPFLEDEPTPEMEELATEKGDLDQPKKPKAPDNPFHGIVSKCFEPHLYVYIESQDKNLGELIDRFVADFKAQGPPKPNTDEGGAVLPSCADLFVYYKKCMVQCSQLSTGEPMIALTTIFQKYLREYAWKILSGNLPKTTTSSGGLTISSLLKEKEGSEVAKFTLEELCLICNILSTAEYCLATTQQLEEKLKEKVDVSLIERINLTGEMDTFSTVISSSIQLLVQDLDAACDPALTAMSKMQWQNVEHVGDQSPYVTSVILHIKQNVPIIRDNLASTRKYFTQFCVKFANSFIPKFITHLFKCKPISMVGAEQVRWT

SEQ ID NO: 4529 - protein, 1369 aa, Homo sapiens
MGGKNKKHKAPAAAVVRAAVSASRAKSAEAGIAGEAQSKKPVSRPATAAAAAAGSREPRVKQGPKIYSFNSTNDSSGPANLDKSILKVVINNKLEQRIIGVINEHKKQNNDKGMISGRLTAKKLQDLYMALQAFSFKTKDIEDAMTNTLLYGGDLHSALDWLCLNLSDDALPEGFSQEFEEQQPKSRPKFQSPQIQATISPPLQPKTKTYEEDPKSKPKKEEKNMEVNMKEWILRYAEQQNEEEKNENSKSLEEEEKFDPNERYLHLAAKLLDAKEQAATFKLEKNKQGQKEAQEKIRKFQREMETLEDHPVFNPAMKISHQQNERKKPPVATEGESALNFNLFEKSAAATEEEKDKKKEPHDVRNFDYTARSWTGKSPKQFLIDWVRKNLPKSPNPSFEKVPVGRYWKCRVRVIKSEDDVLVVCPTILTEDGMQAQHLGATLALYRLVKGQSVHQLLPPTYRDVWLEWSDAEKKREELNKMETNKPRDLFIAKLLNKLKQQQQQQQQHSENKRENSEDPEESWENLVSDEDFSALSLESANVEDLEPVRNLFRKLQSTPKYQKLLKERQQLPVFKHRDSIVETLKRHRVVVVAGETGSGKSTQVPHFLLEDLLLNEWEASKCNIVCTQPRRISAVSLANRVCDELGCENGPGGRNSLCGYQIRMESRACESTRLLYCTTGVLLRKLQEDGLLSNVSHVIVDEVHERSVQSDFLLIILKEILQKRSDLHLILMSATVDSEKFSTYFTHCPILRISGRSYPVEVFHLEDIIEETGFVLEKDSEYCQKFLEEEEEVTINVTSKAGGIKKYQEYIPVQTGAHADLNPFYQKYSSRTQHAILYMNPHKINLDLILELLAYLDKSPQFRNIEGAVLIFLPGLAHIQQLYDLLSNDRRFYSERYKVIALHSILSTQDQAAAFTLPPPGVRKIVLATNIAETGITIPDVVFVIDTGRTKENKYHESSQMSSLVETFVSKASALQRQGRAGRVRDGFCFRMYTRERFEGFMDYSVPEILRVPLEELCLHIMKCNLGSPEDFLSKALDPPQLQVISNAMNLLRKIGACELNEPKLTPLGQHLAALPVNVKIGKMLIFGAIFGCLDPVATLAAVMTEKSPFTTPIGRKDEADLAKSALAMADSDHLTIYNAYLGWKKARQEGGYRSEITYCRRNFLNRTSLLTLEDVKQELIKLVKAAGFSSSTTSTSWEGNRASQTLSFQEIALLKAVLVAGLYDNVGKIIYTKSVDVTEKLACIVETAQGKAQVHPSSVNRDLQTHGWLLYQEKIRYARVYLRETTLITPFPVLLFGGDIEVQHRERLLSIDGWIYFQAPVKIAVIFKQLRVLIDSVLRKKLENPKMSLENDKILQIITELIKTENN

SEQ ID NO: 4530 - protein, 394 aa, Homo sapiens
MTEQETLALLEVKRSDSPEKSSPQALVPNGRQPEGEGGAESPGAESLRVGSSAGSPTAIEGAEDGLDSTVSEAATLPWGTGPQPSAPFPDPPGWRDIEPEPPESEPLTKLEELPEDDANLLPEKAARAFVPIDLQCIERQPQEDLIVRCEAGEGECRTFMPPRVTHPDPTERKWAEAVVRPPGCSCGGCGSCGDREWLRAVASVGAALILFPCLLYGAYAFLPFDVPRLPTMSSRLIYTLRCGVFATFPIVLGILVYGLSLLCFSALRPFGEPRREVEIHRRYVAQSVQLFILYFFNLAVLSTYLPQDTLKLLPLLTGLFAVSRLIYWLTFAVGRSFRGFGYGLTFLPLLSMLMWNLYYMFVVEPERMLTATESRLDYPDHARSASDYRPRPWG

SEQ ID NO: 4531 - protein, 188 aa, Homo sapiens
MSTMFADTLLIVFISVCTALLAEGITWVLVYRTDKYKRLKAEVEKQSKKLEKKKETITESAGRQQKKKIERQEEKLKNNNRDLSMVRMKSMFAIGFCFTALMGMFNSIFDGRVVAKLPFTPLSYIQGLSHRNLLGDDTTDCSFIFLYILCTMSIRQNIQKILGLAPSRAATKQAGGFLGPPPPSGKFS

SEQ ID NO: 4532 - protein, 227 aa, Homo sapiens
MTDFKLGIVRLGRVAGKTKYTLIDEQDIPLVESYSFEARMEVDADGNGAKIFAYAFDKNRGRGSGRLLHELLWERHRGGVAPGFQVVHLNAVTVDNRLDNLQLVPWGWRPKAEETSSKQREQSLYWLAIQQLPTDPIEEQFPVLNVTRYYNANGDVVEEEENSCTYYECHYPPCTVIEKQLREFNICGRCQVARYCGSQCQQKDWPAHKKHCRERKRPFQHELEPER

SEQ ID NO: 4533 - protein, 798 aa, Homo sapiens
MVALPMVLVLLLVLSRGESELDAKIPSTGDATEWRNPHLSMLGSCQPAPSCQKCILSHPSCAWCKQLNFTASGEAEARRCARREELLARGCPLEELEEPRGQQEVLQDQPLSQGARGEGATQLAPQRVRVTLRPGEPQQLQVRFLRAEGYPVDLYYLMDLSYSMKDDLERVRQLGHALLVRLQEVTHSVRIGFGSFVDKTVLPFVSTVPSKLRHPCPTRLERCQSPFSFHHVLSLTGDAQAFEREVGRQSVSGNLDSPEGGFDAILQAALCQEQIGWRNVSRLLVFTSDDTFHTAGDGKLGGIFMPSDGHCHLDSNGLYSRSTEFDYPSVGQVAQALSAANIQPIFAVTSAALPVYQELSKLIPKSAVGELSEDSSNVVQLIMDAYNSLSSTVTLEHSSLPPGVHISYESQCEGPEKREGKAEDRGQCNHVRINQTVTFWVSLQATHCLPEPHLLRLRALGFSEELIVELHTLCDCNCSDTQPQAPHCSDGQGHLQCGVCSCAPGRLGRLCECSVAELSSPDLESGCRAPNGTGPLCSGKGHCQCGRCSCSGQSSGHLCECDDASCERHEGILCGGFGRCQCGVCHCHANRTGRACECSGDMDSCISPEGGLCSGHGRCKCNRCQCLDGYYGALCDQCPGCKTPCERHRDCAECGAFRTGPLATNCSTACAHTNVTLALAPILDDGWCKERTLDNQLFFFLVEDDARGTVVLRVRPQEKGADHTQAIVLGCVGGIVAVGLGLVLAYRLSVEIYDRREYSRFEKEQQQLNWKQDSNPLYKSAITTTINPRFQEADSPTL

SEQ ID NO: 4534 - protein, 114 aa, Homo sapiens
MDPGAALQRRAGGGGGLGAGSPALSGGQGRRRKQPPRPADFKLQVIIIGSRGVGKTSLMERFTDDTFCEACKSTVGKGATATLGRASWRPGSCPSPRGLRVSSSLGVFRGWASR

SEQ ID NO: 4535 - protein, 197 aa, Homo sapiens
MAAVKDSCGKGEMATGNGRRLHLGIPEAVFVEDVDSFMKQPGNETADTVLKKLDEQYQKYKFMELNLAQKKRRLKGQIPEIKQTLEILKYMQKKKESTNSMETRFLLADNLYCKASVPPTDKVCLWLGANVMLEYDIDEAQALLEKNLSTATKNLDSLEEDLDFLRDQFTTTEVNMARVYNWDVKRRNKDDSTKNKA

SEQ ID NO: 4536 - protein, 1675 aa, Homo sapiens
MAQILPIRFQEHLQLQNLGINPANIGFSTLTMESDKFICIREKVGEQAQVVIIDMNDPSNPIRRPISADSAIMNPASKVIALKAGKTLQIFNIEMKSKMKAHTMTDDVTFWKWISLNTVALVTDNAVYHWSMEGESQPVKMFDRHSSLAGCQIINYRTDAKQKWLLLTGISAQQNRVVGAMQLYSVDRKVSQPIEGHAASFAQFKMEGNAEESTLFCFAVRGQAGGKLHIIEVGTPPTGNQPFPKKAVDVFFPPEAQNDFPVAMQISEKHDVVFLITKYGYIHLYDLETGTCIYMNRISGETIFVTAPHEATAGIIGVNRKGQVLSVCVEEENIIPYITNVLQNPDLALRMAVRNNLAGAEELFARKFNALFAQGNYSEAAKVAANAPKGILRTPDTIRRFQSVPAQPGQTSPLLQYFGILLDQGQLNKYESLELCRPVLQQGRKQLLEKWLKEDKLECSEELGDLVKSVDPTLALSVYLRANVPNKVIQCFAETGQVQKIVLYAKKVGYTPDWIFLLRNVMRISPDQGQQFAQMLVQDEEPLADITQIVDVFMEYNLIQQCTAFLLDALKNNRPSEGPLQTRLLEMNLMHAPQVADAILGNQMFTHYDRAHIAQLCEKAGLLQRALEHFTDLYDIKRAVVHTHLLNPEWLVNYFGSLSVEDSLECLRAMLSANIRQNLQICVQVASKYHEQLSTQSLIELFESFKSFEGLFYFLGSIVNFSQDPDVHFKYIQAACKTGQIKEVERICRESNCYDPERVKNFLKEAKLTDQLPLIIVCDRFDFVHDLVLYLYRNNLQKYIEIYVQKVNPSRLPVVIGGLLDVDCSEDVIKNLILVVRGQFSTDELVAEVEKRNRLKLLLPWLEARIHEGCEEPATHNALAKIYIDSNNNPERFLRENPYYDSRVVGKYCEKRDPHLACVAYERGQCDLELINVCNENSLFKSLSRYLVRRKDPELWGSVLLESNPYRRPLIDQVVQTALSETQDPEEVSVTVKAFMTADLPNELIELLEKIVLDNSVFSEHRNLQNLLILTAIKADRTRVMEYINRLDNYDAPDIANIAISNELFEEAFAIFRKFDVNTSAVQVLIEHIGNLDRAYEFAERCNEPAVWSQLAKAQLQKGMVKEAIDSYIKADDPSSYMEVVQAANTSGNWEELVKYLQMARKKARESYVETELIFALAKTNRLAELEEFINGPNNAHIQQVGDRCYDEKMYDAAKLLYNNVSNFGRLASTLVHLGEYQAAVDGARKANSTRTWKEVCFACVDGKEFRLAQMCGLHIVVHADELEELINYYQDRGYFEELITMLEAALGLERAHMGMFTELAILYSKFKPQKMREHLELFWSRVNIPKVLRAAEQAHLWAELVFLYDKYEEYDNAIITMMNHPTDAWKEGQFKDIITKVANVELYYRAIQFYLEFKPLLLNDLLMVLSPRLDHTRAVNYFSKVKQLPLVKPYLRSVQNHNNKSVNESLNNLFITEEDYQALRTSIDAYDNFDNISLAQRLEKHELIEFRRIAAYLFKGNNRWKQSVELCKKDSLYKDAMQYASESKDTELAEELLQWFLQEEKRECFGACLFTCYDLLRPDVVLETAWRHNIMDFAMPYFIQVMKEYLTKVDKLDASESLRKEEEQATETQPIVYGQPQLMLTAGPSVAVPPQAPFGYGYTAPPYGQPQPGFGYSM

SEQ ID NO: 4537 - protein, 337 aa, Homo sapiens
MNSTCIEEQHDLDHYLFPIVYIFVIIVSIPANIGSLCVSFLQAKKESELGIYLFSLSLSDLLYALTLPLWIDYTWNKDNWTFSPALCKGSAFLMYMNFYSSTAFLTCIAVDRYLAVVYPLKFFFLRTRRFALMVSLSIWILETIFNAVMLWEDETVVEYCDAEKSNFTLCYDKYPLEKWQINLNLFRTCTGYAIPLVTILICNRKVYQAVRHNKATENKEKKRIIKLLVSITVTFVLCFTPFHVMLLIRCILEHAVNFEDHSNSGKRTYTMYRITVALTSLNCVADPILYCFVTETGRYDMWNILKFCTGRCNTSQRQRKRILSVSTKDTMELEVLE

SEQ ID NO: 4538 - protein, 74 aa, Homo sapiens
MTNVYSLDGILVFGLLFVCTCAYFKKVPRLKTWLLSEKKGVWGVFYKAAVIGTRLHAAVAIACVVMAFYVLFIK

SEQ ID NO: 4539 - protein, 660 aa, Homo sapiens
MDVLVSECSARLLQQEEEIKSLTAEIDRLKNCGCLGASPNLEQLQEENLKLKYRLNILRKSLQAERNKPTKNMINIISRLQEVFGHAIKAAYPDLENPPLLVTPSQQAKFGDYQCNSAMGISQMLKTKEQKVNPREIAENITKHLPDNECIEKVEIAGPGFINVHLRKDFVSEQLTSLLVNGVQLPALGENKKVIVDFSSPNIAKEMHVGHLRSTIIGESISRLFEFAGYDVLRLNHVGDWGTQFGMLIAHLQDKFPDYLTVSPPIGDLQVFYKESKKRFDTEEEFKKRAYQCVVLLQGKNPDITKAWKLICDVSRQELNKIYDALDVSLIERGESFYQDRMNDIVKEFEDRGFVQVDDGRKIVFVPGCSIPLTIVKSDGGYTYDTSDLAAIKQRLFEEKADMIIYVVDNGQSVHFQTIFAAAQMIGWYDPKVTRVFHAGFGVVLGEDKKKFKTRSGETVRLMDLLGEGLKRSMDKLKEKERDKVLTAEELNAAQTSVAYGCIKYADLSHNRLNDYIFSFDKMLDDRGNTAAYLLYAFTRIRSIARLANIDEEMLQKAARETKILLDHEKEWKLGRCILRFPEILQKILDDLFLHTLCDYIYELATAFTEFYDSCYCVEKDRQTGKILKVNMWRMLLCEAVAAVMAKGFDILGIKPVQRM

SEQ ID NO: 4540 - protein, 434 aa, Homo sapiens
MGRGLWEAWPPAGSSAVAKGNCREEAEGAEDRQPASRRGAGTTAAMAASGPGCRSWCLCPEVPSATFFTALLSLLVSGPRLFLLQQPLAPSGLTLKSEALRNWQVYRLVTYIFVYENPISLLCGAIIIWRFAGNFERTVGTVRHCFFTVIFAIFSAIIFLSFEAVSSLSKLGEVEDARGFTPVAFAMLGVTTVRSRMRRALVFGMVVPSVLVPWLLLGASWLIPQTSFLSNVCGLSIGLAYAHLLLFHRPLRASGAEARSDLPLQPDEEDIRVQVRLRVFSREEGSPEPETEPGAWLLPHTELPPSPVPKPPCVPDAARQWSEAGLLASCTPGHMPTLPPYQPASGLCYVQNHFGPNPTSSSVYPASAGTSLGIQPPTPVNSPGTVYSGALGHQGLQAPRSPPGSPCPERISREVISLGLLKVLPKSLLTKVTY

SEQ ID NO: 4541 - protein, 171 aa, Homo sapiens
MEEYAREPCPWRIVDDCGGAFTMGTIGGGIFQAIKGFRNSPVGVNHRLRGSLTAIKTRAPQLGGSFAVWGGLFSMIDCSMVQVRGKEDPWNSITSGALTGAILAARNGPVAMVGSAAMGGILLALIEGAGILLTRFASAQFPNGPQFAEDPSQLPSTQLPSSPFGDYRQYQ

SEQ ID NO: 4542 - protein, 1246 aa, Homo sapiens
MMETERLVLPPPDPLDLPLRAVELGCTGHWELLNLPGAPESSLPHGLPPCAPDLQQEAEQLFLSSPAWLPLHGVEHSARKWQRKTDPWSLLAVLGAPVPSDLQAQRHPTTGQILGYKEVLLENTNLSATTSLSLRRPPGPASQSLWGNPTQYPFWPGGMDEPTITDLNTREEAEEEIDFEKDLLTIPPGFKKGMDFAPKDCPTPAPGLLSLSCMLEPLDLGGGDEDENEAVGQPGGPRGDTVSASPCSAPLARASSLEDLVLKEASTAVSTPEAPEPPSQEQWAIPVDATSPVGDFYRLIPQPAFQWAFEPDVFQKQAILHLERHDSVFVAAHTSAGKTVVAEYAIALAQKHMTRTIYTSPIKALSNQKFRDFRNTFGDVGLLTGDVQLHPEASCLIMTTEILRSMLYSGSDVIRDLEWVIFDEVHYINDVERGVVWEEVLIMLPDHVSIILLSATVPNALEFADWIGRLKRRQIYVISTVTRPVPLEHYLFTGNSSKTQGELFLLLDSRGAFHTKGYYAAVEAKKERMSKHAQTFGAKQPTHQGGPAQDRGVYLSLLASLRTRAQLPVVVFTFSRGRCDEQASGLTSLDLTTSSEKSEIHLFLQRCLARLRGSDRQLPQVLHMSELLNRGLGVHHSGILPILKEIVEMLFSRGLVKVLFATETFAMGVNMPARTVVFDSMRKHDGSTFRDLLPGEYVQMAGRAGRRGLDPTGTVILLCKGRVPEMADLHRMMMGKPSQLQSQFRLTYTMILNLLRVDALRVEDMMKRSFSEFPSRKDSKAHEQALAELTKRLGALEEPDMTGQLVDLPEYYSWGEELTETQHMIQRRIMESVNGLKSLSAGRVVVVKNQEHHNALGVILQVSSNSTSRVFTTLVLCDKPLSQDPQDRGPATAEVPYPDDLVGFKLFLPEGPCDHTVVKLQPGDMAAITTKVLRVNGEKILEDFSKRQQPKFKKDPPLAAVTTAVQELLRLAQAHPAGPPTLDPVNDLQLKDMSVVEGGLRARKLEELIQGAQCVHSPRFPAQYLKLRERMQIQKEMERLRFLLSDQSLLLLPEYHQRVEVLRTLGYVDEAGTVKLAGRVACAMSSHELLLTELMFDNALSTLRPEEIAALLSGLVCQSPGDAGDQLPNTLKQGIERVRAVAKRIGEVQVACGLNQTVEEFVGELNFGLVEVVYEWARGMPFSELAGLSGTPEGLVVRCIQRLAEMCRSLRGAARLVGEPVLGAKMETAATLLRRDIVFAASLYTQ

SEQ ID NO: 4543 - protein, 729 aa, Homo sapiens
MGKKYKNIVLLKGLEVINDYHFRMVKSLLSNDLKLNLKMREEYDKIQIADLMEEKFRGDAGLGKLIKIFEDIPTLEDLAETLKKEKLKVKGPALSRKRKKEVHATSPAPSTSSTVKTEGAEATPGAQKRKKSTKEKAGPKGSKVSEEQTQPPSPAGAGMSTAMGRSPSPKTSLSAPPNSSSTENPKTVAKCQVTPRRNVLQKRPVIVKVLSTTKPFEYETPEMEKKIMFHATVATQTQFFHVKVLNTSLKEKFNGKKIIIISDYLEYDSLLEVNEESTVSEAGPNQTFEVPNKIINRAKETLKIDILHKQASGNIVYGVFMLHKKTVNQKTTIYEIQDDRGKMDVVGTGQCHNIPCEEGDKLQLFCFRLRKKNQMSKLISEMHSFIQIKKKTNPRNNDPKSMKLPQEQRQLPYPSEASTTFPESHLRTPQMPPTTPSSSFFTKKSEDTISKMNDFMRMQILKEGSHFPGPFMTSIGPAESHPHTPQMPPSTPSSSFLTTLKPRLKTEPEEVSIEDSAQSDLKEVMVLNATESFVYEPKEQKKMFHATVATENEVFRVKVFNIDLKEKFTPKKIIAIANYVCRNGFLEVYPFTLVADVNADRNMEIPKGLIRSASVTPKINQLCSQTKGSFVNGVFEVHKKNVRGEFTYYEIQDNTGKMEVVVHGRLNTINCEEGDKLKLTSFELAPKSGNTGELRSVIHSHIKVIKTRKNKKDILNPDSSMETSPDFFF

SEQ ID NO: 4544 - protein, 737 aa, Homo sapiens
MVVFNGLLKIKICEAVSLKPTAWSLRHAVGPRPQTFLLDPYIALNVDDSRIGQTATKQKTNSPAWHDEFVTDVCNGRKIELAVFHDAPIGYDDFVANCTIQFEELLQNGSRHFEDWIDLEPEGRVYVIIDLSGSSGEAPKDNEERVFRERMRPRKRQGAVRRRVHQVNGHKFMATYLRQPTYCSHCRDFIWGVIGKQGYQCQVCTCVVHKRCHELIITKCAGLKKQETPDQVGSQRFSVNMPHKFGIHNYKVPTFCDHCGSLLWGLLRQGLQCKVCKMNVHRRCETNVAPNCGVDARGIAKVLADLGVTPDKITNSGQRRKKLIAGAESPQPASGSSPSEEDRSKSAPTSPCDQEIKELENNIRKALSFDNRGEEHRAASSPDGQLMSPGENGEVRQGQAKRLGLDEFNFIKVLGKGSFGKVMLAELKGKDEVYAVKVLKKDVILQDDDVDCTMTEKRILALARKHPYLTQLYCCFQTKDRLFFVMEYVNGGDLMFQIQRSRKFDEPRSRFYAAEVTSALMFLHQHGVIYRDLKLDNILLDAEGHCKLADFGMCKEGILNGVTTTTFCGTPDYIAPEILQELEYGPSVDWWALGVLMYEMMAGQPPFEADNEDDLFESILHDDVLYPVWLSKEAVSILKAFMTKNPHKRLGCVASQNGEDAIKQHPFFKEIDWVLLEQKKIKPPFKPRIKTKRDVNNFDQDFTREEPVLTLVDEAIVKQINQEEFKGFSYFGEDLMP

SEQ ID NO: 4545 - protein, 656 aa, Homo sapiens
MASTDYSTYSQAAAQQGYSAYTAQPTQGYAQTTQAYGQQSYGTYGQPTDVSYTQAQTTATYGQTAYATSYGQPPTGYTTPTAPQAYSQPVQGYGTGAYDTTTATVTTTQASYAAQSAYGTQPAYPAYGQQPAATAPTRPQDGNKPTETSQPQSSTGGYNQPSLGYGQSNYSYPQVPGSYPMQPVTAPPSYPPTSYSSTQPTSYDQSSYSQQNTYGQPSSYGQQSSYGQQSSYGQQPPTSYPPQTGSYSQAPSQYSQQSSSYGQQSSFRQDHPSSMGVYGQESGGFSGPGENRSMSGPDNRGRGRGGFDRGGMSRGGRGGGRGGMGSAGERGGFNKPGGPMDEGPDLDLGPPVDPDEDSDNSAIYVQGLNDSVTLDDLADFFKQCGVVKMNKRTGQPMIHIYLDKETGKPKGDATVSYEDPPTAKAAVEWFDGKDFQGSKLKVSLARKKPPMNSMRGGLPPREGRGMPPPLRGGPGGPGGPGGPMGRMGGRGGDRGGFPPRGPRGSRGNPSGGGNVQHRAGDWQCPNPGCGNQNFAWRTECNQCKAPKPEGFLPPPFPPPGGDRGRGGPGGMRGGRGGLMDRGGPGGMFRGGRGGDRGGFRGGRGMDRGGFGGGRRGGPGGPPGPLMEQMGGRRGGRGGPGKMDKGEHRQERRDRPY

SEQ ID NO: 4546 - protein, 583 aa, Homo sapiens
MASTDYSTYSQAAAQQGYSAYTAQPTQGYAQTTQAYGQQSYGTYGQPTDVSYTQAQTTATYGQTAYATSYGQPPTGYTTPTAPQAYSQPVQGYGTGAYDTTTATVTTTQASYAAQSAYGTQPAYPAYGQQPAATAPTRPQDGNKPTETSQPQSSTGGYNQPSLGYGQSNYSYPQVPGSYPMQPVTAPPSYPPTSYSSTQPTSYDQSSYSQQNTYGQPSSYGQQSSYGQQSSYGQQPPTSYPPQTGSYSQAPSQYSQQSSSYGQQRPMDEGPDLDLGPPVDPDEDSDNSAIYVQGLNDSVTLDDLADFFKQCGVVKMNKRTGQPMIHIYLDKETGKPKGDATVSYEDPPTAKAAVEWFDGKDFQGSKLKVSLARKKPPMNSMRGGLPPREGRGMPPPLRGGPGGPGGPGGPMGRMGGRGGDRGGFPPRGPRGSRGNPSGGGNVQHRAGDWQCPNPGCGNQNFAWRTECNQCKAPKPEGFLPPPFPPPGGDRGRGGPGGMRGGRGGLMDRGGPGGMFRGGRGGDRGGFRGGRGMDRGGFGGGRRGGPGGPPGPLMEQMGGRRGGRGGPGKMDKGEHRQERRDRPY

SEQ ID NO: 4547 - protein, 1464 aa, Homo sapiens
MCLLVFPLVPRSPDYILPCSPGWRLRLAASFLLSVFPLLDLLPVALPPGAGPGPIGLEVLAGCVAAVAWISHSLALWVLAHSPHGHSRGPLALALVALLPAPALVLTVLWHCQRGTLLPPLLPGPMARLCLLILQLAALLAYALGWAAPGGPREPWAQEPLLPEDQEPEVAEDGESWLSRFSYAWLAPLLARGACGELRQPQDICRLPHRLQPTYLARVFQAHWQEGARLWRALYGAFGRCYLALGLLKLVGTMLGFSGPLLLSLLVGFLEEGQEPLSHGLLYALGLAGGAVLGAVLQNQYGYEVYKVTLQARGAVLNILYCKALQLGPSRPPTGEALNLLGTDSERLLNFAGSFHEAWGLPLQLAITLYLLYQQVGVAFVGGLILALLLVPVNKVIATRIMASNQEMLQHKDARVKLVTELLSGIRVIKFCGWEQALGARVEACRARELGRLRVIKYLDAACVYLWAALPVVISIVIFITYVLMGHQLTATKVFTALALVRMLILPLNNFPWVINGLLEAKVSLDRIQLFLDLPNHNPQAYYSPDCGRLGAQIKWLLCSDPPAEPSTVLELHGALFSWDPVGTSLETFISHLEVKKGMLVGIVGKVGCGKSSLLAAIAGELHRLRGHVAVRGLSKGFGLATQEPWIQFATIRDNILFGKTFDAQLYKEVLEACALNDDLSILPAGDQTEVGEKGVTLSGGQRARIALARAVYQEKELYLLDDPLAAVDADVANHLLHRCILGMLSYTTRLLCTHRTEYLERADAVLLMEAGRLIRAGPPSEILPLVQAVPKAWAENGQESDSATAQSVQNPEKTKEGLEEEQSTSGRLLQEESKKEGAVALHVYQAYWKAVGQGLALAILFSLLLMQATRNAADWWLSHWISQLKAENSSQEAQPSTSPASMGLFSPQLLLFSPGNLYIPVFPLPKAAPNGSSDIRFYLTVYATIAGVNSLCTLLRAVLFAAGTLQAAATLHRRLLHRVLMAPVTFFNATPTGRILNRFSSDVACADDSLPFILNILLANAAGLLGLLAVLGSGLPWLLLLLPPLSIMYYHVQRHYRASSRELRRLGSLTLSPLYSHLADTLAGLSVLRATGATYRFEEENLRLLELNQRCQFATSATMQWLDIRLQLMGAAVVSAIAGIALVQHQQGLANPGLVGLSLSYALSLTGLLSGLVSSFTQTEAMLVSVERLEEYTCDLPQEPQGQPLQLGTGWLTQGGVEFQDVVLAYRPGLPNALDGVTFCVQPGEKLGIVGRTGSGKSSLLLVLFRLLEPSSGRVLLDGVDTSQLELAQLRSQLAIIPQEPFLFSGTVRENLDPQGLHKDRALWQALKQCHLSEVITSMGGLDGELGEGGRSLSLGQRQLLCLARALLTDAKILCIDEATASVDQKTDQLLQQTICKRFANKTVLTIAHRLNTILNSDRVLVLQAGRVVELDSPATLRNQPHSLFQQLLQSSQQGVPASLGGP

SEQ ID NO: 4548 - protein, 505 aa, Homo sapiens
MPQQLLITLPTEASTWVKLQHPKKAVEGAPLWEDVTKMFEGEALLSQDAEDVKTQRESLEDEVTPGLPTAESQELLTFKDISIDFTQEEWGQLAPAHQNLYREVMLENYSNLVSVGYQLSKPSVISQLEKGEEPWMAEKEGPGDPSSDLKSKIETIESTAKSTISQERLYHGIMMESFMRDDIIYSTLRKVSTYDDVLERHQETCMRDVRQAILTHKKRVQETNKFGENIIVHSNVIIEQRHHKYDTPTKRNTYKLDLINHPTSYIRTKTYECNICEKIFKQPIHLTEHMRIHTGEKPFRCKECGRAFSQSASLSTHQRIHTGEKPFECEECGKAFRHRSSLNQHHRTHTGEKPYVCDKCQKAFSQNISLVQHLRTHSGEKPFTCNECGKTFRQIRHLSEHIRIHTGEKPYACTACCKTFSHRAYLTHHQRIHTGERPYKCKECGKAFRQRIHLSNHKTVHTGVKAYECNRCGKAYRHDSSFKKHQRHHTGEKPYECNECGKAFS

SEQ ID NO: 4549 - protein, 551 aa, Homo sapiens
MAAPVRLGRKRPLPACPNPLFVRWLTEWRDEATRSRHRTRFVFQKALRSLRRYPLPLRSGKEAKILQHFGDGLCRMLDERLQRHRTSGGDHAPDSPSGENSPAPQGRLAEVQDSSMPVPAQPKAGGSGSYWPARHSGARVILLVLYREHLNPNGHHFLTKEELLQRCAQKSPRVAPGSAPPWPALRSLLHRNLVLRTHQPARYSLTPEGLELAQKLAESEGLSLLNVGIGPKEPPGEETAVPGAASAELASEAGVQQQPLELRPGEYRVLLCVDIGETRGGGHRPELLRELQRLHVTHTVRKLHVGDFVWVAQETNPRDPANPGELVLDHIVERKRLDDLCSSIIDGRFREQKFRLKRCGLERRVYLVEEHGSVHNLSLPESTLLQAVTNTQVIDGFFVKRTADIKESAAYLALLTRGLQRLYQGHTLRSRPWGTPGNPESGAMTSPNPLCSLLTFSDFNAGAIKNKAQSVREVFARQLMQVRGVSGEKAAALVDRYSTPASLLAAYDACATPKEQETLLSTIKCGRLQRNLGPALSRTLSQLYCSYGPLT

SEQ ID NO: 4550 - protein, 307 aa, Homo sapiens
MTAGSPEECGEVRRSPEGRVSRLGRRLGRRRRPRSPPEPLRVRARLRLRSPSGAFAALGALVVLVGMGIAVAGYWPHRAGAPGSRAANASSPQMSELRREGRGGGRAHGPHERLRLLGPVIMGVGLFVFICANTLLYENRDLETRRLRQGVLRAQALRPPDGPGWDCALLPSPGPRSPRAVGCAEPEIWDPSPRRGTSPVPSVRSLRSEPANPRLGLPALLNSYPLKGPGLPPPWGPRTQTGHVIITVQPSGSCIEHSKSLDLGLGELLLGAPAARDCAHRSWPRLDRLSLGGYAKLGGGGDLGARV

SEQ ID NO: 4551 - protein, 198 aa, Homo sapiens
MFKVIQRSVGPASLSLLTFKVYAAPKKDSPPKNSVKVDELSLYSVPEGQSKYVEEARSQLEESISQLRHYCEPYTTWCQETYSQTKPKMQSLVQWGLDSYDYLQNAPPGFFPRLGVIGFAGLIGLLLARGSKIKKLVYPPGFMGLAASLYYPQQAIVFAQVSGERLYDWGLRGYIVIEDLWKENFQKPGNVKNSPGTK

SEQ ID NO: 4552 - protein, 475 aa, Homo sapiens
MTRGTGGTAQRGRSGPDSQGLLDSSLMASGTASRSEDEESLAGQKRASSQALGTIPKRRSSSRFIKRKKFDDELVESSLAKSSTRAKGASGVEPGRCSGSEPSSSEKKKVSKAPSTPVPPSPAPAPGLTKRVKKSKQPLQVTKDLGRWKPADDLLLINAVLQTNDLTSVHLGVKFSCRFTLREVQERWYALLYDPVISKLACQAMRQLHPEAIAAIQSKALFSKAEEQLLSKVGSTSQPTLETFQDLLHRHPDAFYLARTAKALQAHWQLMKQYYLLEDQTVQPLPKGDQVLNFSDAEDLIDDSKLKDMRDEVLEHELMVADRRQKREIRQLEQELHKWQVLVDSITGMSSPDFDNQTLAVLRGRMVRYLMRSREITLGRATKDNQIDVDLSLEGPAWKISRKQGVIKLKNNGDFFIANEGRRPIYIDGRPVLCGSKWRLSNNSVVEIASLRFVFLINQDLIALIRAEAAKITPQ

SEQ ID NO: 4553 - protein, 462 aa, Homo sapiens
MDKDSQGLLDSSLMASGTASRSEDEESLAGQKRASSQALGTIPKRRSSSRFIKRKKFDDELVESSLAKSSTRAKGASGVEPGRCSGSEPSSSEKKKVSKAPSTPVPPSPAPAPGLTKRVKKSKQPLQVTKDLGRWKPADDLLLINAVLQTNDLTSVHLGVKFSCRFTLREVQERWYALLYDPVISKLACQAMRQLHPEAIAAIQSKALFSKAEEQLLSKVGSTSQPTLETFQDLLHRHPDAFYLARTAKALQAHWQLMKQYYLLEDQTVQPLPKGDQVLNFSDAEDLIDDSKLKDMRDEVLEHELMVADRRQKREIRQLEQELHKWQVLVDSITGMSSPDFDNQTLAVLRGRMVRYLMRSREITLGRATKDNQIDVDLSLEGPAWKISRKQGVIKLKNNGDFFIANEGRRPIYIDGRPVLCGSKWRLSNNSVVEIASLRFVFLINQDLIALIRAEAAKITPQ

SEQ ID NO: 4554 - protein, 293 aa, Homo sapiens
MAMEMRLPVARKPLSERLGRDTKKHLVVPGDTITTDTGFMRGHGTYMGEEKLIASVAGSVERVNKLICVKALKTRYIGEVGDIVVGRITEVQQKRWKVETNSRLDSVLLLSSMNLPGGELRRRSAEDELAMRGFLQEGDLISAEVQAVFSDGAVSLHTRSLKYGKLGQGVLVQVSPSLVKRQKTHFHDLPCGASVILGNNGFIWIYPTPEHKEEEAGGFIANLEPVSLADREVISRLRNCIISLVTQRMMLYDTSILYCYEASLPHQIKDILKPEIMEEIVMETRQRLLEQEG

SEQ ID NO: 4555 - protein, 518 aa, Homo sapiens
MVQLVLQYRDYQRATQRLAGIPELLNKLRQAPDFYVEMKWEFTSWVPLVSKMCPSDVYRVWKRGESLRVDTSLLGFEHVTWQRGRRSFIFKGQEAGALVMEVDHDRQVVHVETLGLTLQEPETLLAAMRPSEEHVASRLTSPIVSTHLDTRNVAFERNKCGIWGWRSEKMETVSGYEAKVYSATNVELVTRTRTEHLSDQDKSRSKAGKTPFQSFLGMAQQHSSHTGAPVQQAASPTNPTAISPEEYFDPNFSLESRNIGRPIEMSSKVQRFKATLWLSEEHPLSLGDQVTPIIDLMAISNAHFAKLRDFITLRLPPGFPVKIEIPLFHVLNARITFSNLCGCDEPLSSVWVPAPSSAVAASGNPFPCEVDPTVFEVPNGYSVLGMERNEPLRDEDDDLLQFAIQQSLLEAGTEAEQVTVWEALTNTRPGARPPPQATVYEEQLQLERALQESLQLSTEPRGPGSPPRTPPAPGPPSFEEQLRLALELSSREQEERERRGQQEEEDLQRILQLSLTEH

SEQ ID NO: 4556 - protein, 1217 aa, Homo sapiens
MKGMSHEPKSPSLGMLSTATRTTATVNPLTPSPLNGALVPSGSPATSSALSAQAAPSSSFAAALRKLAKQAEEPRGSSLSSESSPVSSPATNHSSPASTPKRVPMGPIIVPPGGHSVPSTPPVVTIAPTKTVNGVWRSESRQDAGSRSSSGGRERLIVEPPLPQEKAGGPAIPSHLLSTPYPFGLSPSSVVQDSRFPPLNLQRPVHHVVPPSTVTEDYLRSFRPYHTTDDLRMSSLPPLGLDPATAAAYYHPSYLAPHPFPHPAFRMDDSYCLSALRSPFYPIPTPGSLPPLHPSAMHLHLSGVRYPPELSHSSLAALHSERMSGLSAERLQMDEELRREREREREREREREADREREKEREREREKEREQEKEREREKERERELERQREQRAREKELLAAKALEPSFLPVAELHGLRGHATEERGKPSEQLTPTRAEKLKDAGLQAPKPVQHPLHPVPTPHHTVPSLISNHGIFSLPSSSAATALLIQRTNEEEKWLARQRRLRQEKEDRQSQVSEFRQQVLEQHLDMGRPPVPAEAEHRPESTTRPGPNRHEPGGRDPPQHFGGPPPLISPKPQLHAAPTALWNPVSLMDNTLETRRAESHSLHSHPAAFEPSRQAAVPLVKVERVFCPEKAEEGPRKREPAPLDKYQPPPPPPREGGSLEHQPFLPGPGPFLAELEKSTQTILGQQRASLPQAATFGELSGPLKPGSPYRPPVPRAPDPAYIYDEFLQQRRRLVSKLDLEERRRREAQEKGYYYDLDDSYDESDEEEVRAHLRCVAEQPPLKLDTSSEKLEFLQLFGLTTQQQKEELVAQKRRKRRRMLRERSPSPPTIQSKRQTPSPRLALSTRYSPDEMNNSPNFEEKKKFLTIFNLTHISAEKRKDKERLVEMLRAMKQKALSAAVADSLTNSPRDSPAVSLSEPATQQASLDVEKPVGVAASLSDIPKAAEPGKLEQVRPQELSRVQELAPASGEKARLSEAPGGKKSLSMLHYIRGAAPKDIPVPLSHSTNGKSKPWEPFVAEEFAHQFHESVLQSTQKALQKHKGSVAVLSAEQNHKVDTSVHYNIPELQSSSRAPPPQHNGQQEPPTARKGPPTQELDRDSEEEEEEDDEDGEDEEEVPKRKWQGIEAVFEAYQEHIEEQNLERQVLQTQCRRLEARHYSLSLTAEQLSHSVAELRSQKQKMVSERERLQAELDHLRKCLALPAMHWPRGYLKGYPR

SEQ ID NO: 4557 - protein, 170 aa, Homo sapiens
MNRKDSKRKSHQECTGKIGGRGRPRQVRRHKTCPSPREISKVMASMNLGLLSEGGCSEDELLEKCIQSFDSAGSLCHEDHMLNMVLAMHSWVLPSADLAARLLTSYQKATGDTQELRRLQICHLVRYWLMRHPEVMHQDPQLEEVIGRFWATVAREGNSAQRRLGDSSDL

SEQ ID NO: 4558 - protein, 659 aa, Homo sapiens
MNRKDSKRKSHQECTGKIGGRGRPRQVRRHKTCPSPREISKVMASMNLGLLSEGGCSEDELLEKCIQSFDSAGSLCHEDHMLNMVLAMHSWVLPSADLAARLLTSYQKATGDTQELRRLQICHLVRYWLMRHPEVMHQDPQLEEVIGRFWATVAREGNSAQRRLGDSSDLPGLGKKRKVSLLFDHLETGELAQHLTYLEFRSFQAITPQDLRSYVLQGSVRGCPALEGSVGLSNSVSRWVQVMVLSRPGPLQRAQVLDKFIHVAQRLHQLQNFNTLMAVTGGLCHSAISRLKDSHAHLSPDSTKALLELTELLASHNNYARYRRTWAGCAGFRLPVLGVHLKDLVSLHEAQPDRLPDGRLHLPKLNNLYLRLQELVALQGQHPPCSANEDLLHLLTLSLDLFYTEDEIYELSYAREPRCPKSLPPSPFNAPLVVEWAPGVTPKPDRVTLGRHVEQLVESVFKNYDPEGRGTISQEDFERLSGNFPFACHGLHPPPRQGRGSFSREELTGYLLRASAICSKLGLAFLHTFHEVTFRKPTFCDSCSGFLWGVTKQGYRCRECGLCCHKHCRDQVKVECKKRPGAKGDAGPPGAPVPSTPAPHASCGSEENHSYTLSLEPETGCQLRHAWTQTESPHPSWETDTVPCPVMDPPSTASSKLDS

SEQ ID NO: 4559 - protein, 673 aa, Homo sapiens
MNRKDSKRKSHQECTGKIGGRGRPRQVRRHKTCPSPREISKVMASMNLGLLSEGGCSEDELLEKCIQSFDSAGSLCHEDHMLNMVLAMHSWVLPSADLAARLLTSYQKATGDTQELRRLQICHLVRYWLMRHPEVMHQDPQLEEVIGRFWATVAREGNSAQRRLGDSSDLLSPGGPGPPLPMSSPGLGKKRKVSLLFDHLETGELAQHLTYLEFRSFQAITPQDLRSYVLQGSVRGCPALEGSVGLSNSVSRWVQVMVLSRPGPLQRAQVLDKFIHVAQRLHQLQNFNTLMAVTGGLCHSAISRLKDSHAHLSPDSTKALLELTELLASHNNYARYRRTWAGCAGFRLPVLGVHLKDLVSLHEAQPDRLPDGRLHLPKLNNLYLRLQELVALQGQHPPCSANEDLLHLLTLSLDLFYTEDEIYELSYAREPRCPKSLPPSPFNAPLVVEWAPGVTPKPDRVTLGRHVEQLVESVFKNYDPEGRGTISQEDFERLSGNFPFACHGLHPPPRQGRGSFSREELTGYLLRASAICSKLGLAFLHTFHEVTFRKPTFCDSCSGFLWGVTKQGYRCRECGLCCHKHCRDQVKVECKKRPGAKGDAGPPGAPVPSTPAPHASCGSEENHSYTLSLEPETGCQLRHAWTQTESPHPSWETDTVPCPVMDPPSTASSKLDS

SEQ ID NO: 4560 - protein, 673 aa, Homo sapiens; identical to SEQ ID NO: 4559

SEQ ID NO: 4561 - protein, 396 aa, Homo sapiens
MPRVKAAQAGRQSSAKRHLAEQFAVGEIITDMAKKEWKVGLPIGQGGFGCIYLADMNSSESVGSDAPCVVKVEPSDNGPLFTELKFYQRAAKPEQIQKWIRTRKLKYLGVPKYWGSGLHDKNGKSYRFMIMDRFGSDLQKIYEANAKRFSRKTVLQLSLRILDILEYIHEHEYVHGDIKASNLLLNYKNPDQVYLVDYGLAYRYCPEGVHKEYKEDPKRCHDGTIEFTSIDAHNGVAPSRRGDLEILGYCMIQWLTGHLPWEDNLKDPKYVRDSKIRYRENIASLMDKCFPEKNKPGEIAKYMETVKLLDYTEKPLYENLRDILLQGLKAIGSKDDGKLDLSVVENGGLKAKTITKKRKKEIEESKEPGVEDTEWSNTQTEEAIQTRSRTRKRVQK

SEQ ID NO: 4562 - protein, 926 aa, Homo sapiens
MTTKDYPSLWGFGTTKTFKIPIEHLDFKYIEKCSDVKHLEKILCVLRSGEEGYYPELTEFCEKHLQALAPESRALRKDKPAATAASFTAEEWEKIDGDIKSWVSEIKKEEDKMHFHETETFPAMKDNLPPVRGSNSCLHVGKEKYSKRPTKKKTPRDYAEWDKFDVEKECLKIDEDYKEKTVIDKSHLSKIETRIDTAGLTEKEKDFLATREKEKGNEAFNSGDYEEAVMYYTRSISALPTVVAYNNRAQAEIKLQNWNSAFQDCEKVLELEPGNVKALLRRATTYKHQNKLREATEDLSKVLDVEPDNDLAKKTLSEVERDLKNSEAASETQTKGKRMVIQEIENSEDEEGKSGRKHEDGGGDKKPAEPAGAARAAQPCVMGNIQKKLTGKAEGGKRPARGAPQRGQTPEAGADKRSPRRASAAAAAGGGATGHPGGGQGAENPAGLKSQGNELFRSGQFAEAAGKYSAAIALLEPAGSEIADDLSILYSNRAACYLKEGNCSGCIQDCNRALELHPFSMKPLLRRAMAYETLEQYGKAYVDYKTVLQIDCGLQLANDSVNRLSRILMELDGPNWREKLSPIPAVPASVPLQAWHPAKEMISKQAGDSSSHRQQGITDEKTFKALKEEGNQCVNDKNYKDALSKYSECLKINNKECAIYTNRALCYLKLCQFEEAKQDCDQALQLADGNVKAFYRRALAHKGLKNYQKSLIDLNKVILLDPSIIEAKMELEEVTRLLNLKDKTAPFNKEKERRKIEIQEVNEGKEEPGRPAGEVSMGCLASEKGGKSSRSPEDPEKLPIAKPNNAYEFGQIINALSTRKDKEACAHLLAITAPKDLPMFLSNKLEGDTFLLLIQSLKNNLIEKDPSLVYQHLLYLSKAERFKMMLTLISKGQKELIEQLFEDLSDTPNNHFTLEDIQALKRQYEL

SEQ ID NO: 4563 - protein, 926 aa, Homo sapiens; identical to SEQ ID NO: 4562

SEQ ID NO: 4564 - protein, 172 aa, Homo sapiens
MPGIVELPTLEELKVDEVKISSAVLKAAAHHYGAQCDKPNKEFMLCRWEEKDPRRCLEEGKLVNKCALDFFRQIKRHCAEPFTEYWTCIDYTGQQLFRHCRKQQAKFDECVLDKLGWVRPDLGELSKVTKVKTDRPLPENPYHSRPRPDPSPEIEGDLQPATHGSRFYFWTK

SEQ ID NO: 4565 - protein, 1107 aa, Homo sapiens
MAFSYLFATCARGLLPRRPRSGASGPRWSEGPGEARAGRRAPGPAAGTTEPPYGRRQRLAAAPGPRRGKRRRGGGGGGGGGGGDGGSAMEPGEVKDRILENISLSVKKLQSYFAACEDEIPAIRNHDKVLQRLCEHLDHALLYGLQDLSSGYWVLVVHFTRREAIKQIEVLQHVATNLGRSRAWLYLALNENSLESYLRLFQENLGLLHKYYVKNALVCSHDHLTLFLTLVSGLEFIRFELDLDAPYLDLAPYMPDYYKPQYLLDFEDRLPSSVHGSDSLSLNSFNSVTSTNLEWDDSAIAPSSEDYDFGDVFPAVPSVPSTDWEDGDLTDTVSGPRSTASDLTSSKASTRSPTQRQNPFNEEPAETVSSSDTTPVHTTSQEKEEAQALDPPDACTELEVIRVTKKKKIGKKKKSRSDEEASPLHPACSQKKCAKQGDGDSRNGSPSLGRDSPDTMLASPQEEGEGPSSTTESSERSEPGLLIPEMKDTSMERLGQPLSKVIDQLNGQLDPSTWCSRAEPPDQSFRTGSPGDAPERPPLCDFSEGLSAPMDFYRFTVESPSTVTSGGGHHDPAGLGQPLHVPSSPEAAGQEEEGGGGEGQTPRPLEDTTREAQELEAQLSLVREGPVSEPEPGTQEVLCQLKRDQPSPCLSSAEDSGVDEGQGSPSEMVHSSEFRVDNNHLLLLMIHVFRENEEQLFKMIRMSTGHMEGNLQLLYVLLTDCYVYLLRKGATEKPYLVEEAVSYNELDYVSVGLDQQTVKLVCTNRRKQFLLDTADVALAEFFLASLKSAMIKGCREPPYPSILTDATMEKLALAKFVAQESKCEASAVTVRFYGLVHWEDPTDESLGPTPCHCSPPEGTITKEGMLHYKAGTSYLGKEHWKTCFVVLSNGILYQYPDRTDVIPLLSVNMGGEQCGGCRRANTTDRPHAFQVILSDRPCLELSAESEAEMAEWMQHLCQAVSKGVIPQGVAPSPCIPCCLVLTDDRLFTCHEDCQTSFFRSLGTAKLGDISAVSTEPGKEYCVLEFSQDSQQLLPPWVIYLSCTSELDRLLSALNSGWKTIYQVDLPHTAIQEASNKKKFEDALSLIHSAWQRSDSLCRGRASRDPWC

SEQ ID NO: 4566 - protein, 1107 aa, Homo sapiens; identical to SEQ ID NO: 4565

SEQ ID NO: 4567 - protein, 1516 aa, Homo sapiens
MAPYPCGCHILLLLFCCLAAARANLLNLNWLWFNNEDTSHAATTIPEPQGPLPVQPTADTTTHVTPRNGSTEPATAPGSPEPPSELLEDGQDTPTSAESPDAPEENIAGVGAEILNVAKGIRSFVQLWNDTVPTESLARAETLVLETPVGPLALAGPSSTPQENGTTLWPSRGIPSSPGAHTTEAGTLPAPTPSPPSLGRPWAPLTGPSVPPPSSERISEEVGLLQLLGDPPPQQVTQTDDPDVGLAYVFGPDANSGQVARYHFPSLFFRDFSLLFHIRPATEGPGVLFAITDSAQAMVLLGVKLSGVQDGHQDISLLYTEPGAGQTHTAASFRLPAFVGQWTHLALSVAGGFVALYVDCEEFQRMPLARSSRGLELEPGAGLFVAQAGGADPDKFQGVIAELKVRRDPQVSPMHCLDEEGDDSDGAFGDSGSGLGDARELLREETGAALKPRLPAPPPVTTPPLAGGSSTEDSRSEEVEEQTTVASLGAQTLPGSDSVSTWDGSVRTPGGRVKEGGLKGQKGEPGVPGPPGRAGPPGSPCLPGPPGLPCPVSPLGPAGPALQTVPGPQGPPGPPGRDGTPGRDGEPGDPGEDGKPGDTGPQGFPGTPGDVGPKGDKGDPGVGERGPPGPQGPPGPPGPSFRHDKLTFIDMEGSGFGGDLEALRGPRGFPGPPGPPGVPGLPGEPGRFGVNSSDVPGPAGLPGVPGREGPPGFPGLPGPPGPPGREGPPGRTGQKGSLGEAGAPGHKGSKGAPGPAGARGESGLAGAPGPAGPPGPPGPPGPPGPGLPAGFDDMEGSGGPFWSTARSADGPQGPPGLPGLKGDPGVPGLPGAKGEVGADGIPGFPGLPGREGIAGPQGPKGDRGSRGEKGDPGKDGVGQPGLPGPPGPPGPVVYVSEQDGSVLSVPGPEGRPGFAGFPGPAGPKGNLGSKGERGSPGPKGEKGEPGSIFSPDGGALGPAQKGAKGEPGFRGPPGPYGRPGYKGEIGFPGRPGRPGMNGLKGEKGEPGDASLGFGMRGMPGPPGPPGPPGPPGTPVYDSNVFAESSRPGPPGLPGNQGPPGPKGAKGEVGPPGPPGQFPFDFLQLEAEMKGEKGDRGDAGQKGERGEPGGGGFFGSSLPGPPGPPGPRGYPGIPGPKGESIRGQPGPPGPQGPPGIGYEGRQGPPGPPGPPGPPSFPGPHRQTISVPGPPGPPGPPGPPGTMGASSGVRLWATRQAMLGQVHEVPEGWLIFVAEQEELYVRVQNGFRKVQLEARTPLPRGTDNEVAALQPPVVQLHDSNPYPRREHPHPTARPWRADDILASPPRLPEPQPYPGAPHHSSYVHLRPARPTSPPAHSHRDFQPVLHLVALNSPLSGGMRGIRGADFQCFQQARAVGLAGTFRAFLSSRLQDLYSIVRRADRAAVPIVNLKDELLFPSWEALFSGSEGPLKPGARIFSFDGKDVLRHPTWPQKSVWHGSDPNGRRLTESYCETWRTEAPSATGQASSLLGGRLLGQSAASCHHAYIVLCIENSFMTASK

SEQ ID NO: 4568 - protein, 1473 aa, Homo sapiens
MAPYPCGCHILLLLFCCLAAARANLLNLNWLWFNNEDTSHAATTIPEPQGPLPVQPTADTTTHVTPRNGSTEPATAPGSPEPPSELLEDGQDTPTSAESPDAPEENIAGVGAEILNVAKGIRSFVQLWNDTVPTESLARAETLVLETPVGPLALAGPSSTPQENGTTLWPSRGIPSSPGAHTTEAGTLPAPTPSPPSLGRPWAPLTGPSVPPPSSERISEEVGLLQLLGDPPPQQVTQTDDPDVGLAYVFGPDANSGQVARYHFPSLFFRDFSLLFHIRPATEGPGVLFAITDSAQAMVLLGVKLSGVQDGHQDISLLYTEPGAGQTHTAASFRLPAFVGQWTHLALSVAGGFVALYVDCEEFQRMPLARSSRGLELEPGAGLFVAQAGGADPDKFQGVIAELKVRRDPQVSPMHCLDEEGDDSDGAFGDSGSGLGDARELLREETGAALKPRLPAPPPVTTPPLAGGSSTEDSRSEEVEEQTTVASLGAQTLPGSDSVSTWDGSVRTPGGRVKEGGLKGQKGEPGVPAGPPGRDGTPGRDGEPGDPGEDGKPGDTGPQGFPGTPGDVGPKGDKGDPGVGERGPPGPQGPPGPPGPSFRHDKLTFIDMEGSGFGGDLEALRGPRGFPGPPGPPGVPGLPGEPGRFGVNSSDVPGPAGLPGVPGREGPPGFPGLPGPPGPPGREGPPGRTGQKGSLGEAGAPGHKGSKGAPGPAGARGESGLAGAPGPAGPPGPPGPPGPPGPGLPAGFDDMEGSGGPFWSTARSADGPQGPPGLPGLKGDPGVPGLPGAKGEVGADGIPGFPGLPGREGIAGPQGPKGDRGSRGEKGDPGKDGVGQPGLPGPPGPPGPVVYVSEQDGSVLSVPGPEGRPGFAGFPGPAGPKGNLGSKGERGSPGPKGEKGEPGSIFSPDGGALGPAQKGAKGEPGFRGPPGPYGRPGYKGEIGFPGRPGRPGMNGLKGEKGEPGDASLGFGMRGMPGPPGPPGPPGPPGTPVYDSNVFAESSRPGPPGLPGNQGPPGPKGAKGEVGPPGPPGQFPFDFLQLEAEMKGEKGDRGDAGQKGERGEPGGGGFFGSSLPGPPGPPGPRGYPGIPGPKGESIRGQPGPPGPQGPPGIGYEGRQGPPGPPGPPGPPSFPGPHRQTISVPGPPGPPGPPGPPGTMGASSGVRLWATRQAMLGQVHEVPEGWLIFVAEQEELYVRVQNGFRKVQLEARTPLPRGTDNEVAALQPPVVQLHDSNPYPRREHPHPTARPWRADDILASPPRLPEPQPYPGAPHHSSYVHLRPARPTSPPAHSHRDFQPVLHLVALNSPLSGGMRGIRGADFQCFQQARAVGLAGTFRAFLSSRLQDLYSIVRRADRAAVPIVNLKDELLFPSWEALFSGSEGPLKPGARIFSFDGKDVLRHPTWPQKSVWHGSDPNGRRLTESYCETWRTEAPSATGQASSLLGGRLLGQSAASCHHAYIVLCIENSFMTASK

SEQ ID NO: 4569 - protein, 1336 aa, Homo sapiens
MAPRCPWPWPRRRRLLDVLAPLVLLLGVRAASAEPERISEEVGLLQLLGDPPPQQVTQTDDPDVGLAYVFGPDANSGQVARYHFPSLFFRDFSLLFHIRPATEGPGVLFAITDSAQAMVLLGVKLSGVQDGHQDISLLYTEPGAGQTHTAASFRLPAFVGQWTHLALSVAGGFVALYVDCEEFQRMPLARSSRGLELEPGAGLFVAQAGGADPDKFQGVIAELKVRRDPQVSPMHCLDEEGDDSDGAFGDSGSGLGDARELLREETGAALKPRLPAPPPVTTPPLAGGSSTEDSRSEEVEEQTTVASLGAQTLPGSDSVSTWDGSVRTPGGRVKEGGLKGQKGEPGVPGPPGRAGPPGSPCLPGPPGLPCPVSPLGPAGPALQTVPGPQGPPGPPGRDGTPGRDGEPGDPGEDGKPGDTGPQGFPGTPGDVGPKGDKGDPGVGERGPPGPQGPPGPPGPSFRHDKLTFIDMEGSGFGGDLEALRGPRGFPGPPGPPGVPGLPGEPGRFGVNSSDVPGPAGLPGVPGREGPPGFPGLPGPPGPPGREGPPGRTGQKGSLGEAGAPGHKGSKGAPGPAGARGESGLAGAPGPAGPPGPPGPPGPPGPGLPAGFDDMEGSGGPFWSTARSADGPQGPPGLPGLKGDPGVPGLPGAKGEVGADGIPGFPGLPGREGIAGPQGPKGDRGSRGEKGDPGKDGVGQPGLPGPPGPPGPVVYVSEQDGSVLSVPGPEGRPGFAGFPGPAGPKGNLGSKGERGSPGPKGEKGEPGSIFSPDGGALGPAQKGAKGEPGFRGPPGPYGRPGYKGEIGFPGRPGRPGMNGLKGEKGEPGDASLGFGMRGMPGPPGPPGPPGPPGTPVYDSNVFAESSRPGPPGLPGNQGPPGPKGAKGEVGPPGPPGQFPFDFLQLEAEMKGEKGDRGDAGQKGERGEPGGGGFFGSSLPGPPGPPGPRGYPGIPGPKGESIRGQPGPPGPQGPPGIGYEGRQGPPGPPGPPGPPSFPGPHRQTISVPGPPGPPGPPGPPGTMGASSGVRLWATRQAMLGQVHEVPEGWLIFVAEQEELYVRVQNGFRKVQLEARTPLPRGTDNEVAALQPPVVQLHDSNPYPRREHPHPTARPWRADDILASPPRLPEPQPYPGAPHHSSYVHLRPARPTSPPAHSHRDFQPVLHLVALNSPLSGGMRGIRGADFQCFQQARAVGLAGTFRAFLSSRLQDLYSIVRRADRAAVPIVNLKDELLFPSWEALFSGSEGPLKPGARIFSFDGKDVLRHPTWPQKSVWHGSDPNGRRLTESYCETWRTEAPSATGQASSLLGGRLLGQSAASCHHAYIVLCIENSFMTASK

SEQ ID NO: 4570 - protein, 693 aa, Homo sapiens
MATSGANGPGSATASASNPRKFSEKIALQKQRQAEETAAFEEVMMDIGSTRLQAQKLRLAYTRSSHYGGSLPNVNQIGSGLAEFQSPLHSPLDSSRSTRHHGLVERVQRDPRRMVSPLRRYTRHIDSSPYSPAYLSPPPESSWRRTMAWGNFPAEKGQLFRLPSALNRTSSDSALHTSVMNPSPQDTYPGPTPPSILPSRRGGILDGEMDPKVPAIEENLLDDKHLLKPWDAKKLSSSSSRPRSCEVPGINIFPSPDQPANVPVLPPAMNTGGSLPDLTNLHFPPPLPTPLDPEETAYPSLSGGNSTSNLTHTMTHLGISRGMGLGPGYDAPGLHSPLSHPSLQSSLSNPNLQASLSSPQPQLQGSHSHPSLPASSLARHVLPTTSLGHPSLSAPALSSSSSSSSTSSPVLGAPSYPASTPGASPHHRRVPLSPLSLLAGPADARRSQQQLPKQFSPTMSPTLSSITQGVPLDTSKLSTDQRLPPYPYSSPSLVLPTQPHTPKSLQQPGLPSQSCSVQSSGGQPPGRQSHYGTPYPPGPSGHGQQSYHRPMSDFNLGNLEQFSMESPSASLVLDPPGFSEGPGFLGGEGPMGGPQDPHTFNHQNLTHCSRHGSGPNIILTGDSSPGFSKEIAAALAGVPGFEVSAAGLELGLGLEDELRMEPLGLEGLNMLSDPCALLPDPAVEESFRSDRLQ

SEQ ID NO: 4571 - protein, 855 aa, Homo sapiens
MVVMARLSRPERPDLVFEEEDLPYEEEIMRNQFSVKCWLRYIEFKQGAPKPRLNQLYERALKLLPCSYKLWYRYLKARRAQVKHRCVTDPAYEDVNNCHERAFVFMHKMPRLWLDYCQFLMDQGRVTHTRRTFDRALRALPITQHSRIWPLYLRFLRSHPLPETAVRGYRRFLKLSPESAEEYIEYLKSSDRLDEAAQRLATVVNDERFVSKAGKSNYQLWHELCDLISQNPDKVQSLNVDAIIRGGLTRFTDQLGKLWCSLADYYIRSGHFEKARDVYEEAIRTVMTVRDFTQVFDSYAQFEESMIAAKMETASELGREEEDDVDLELRLARFEQLISRRPLLLNSVLLRQNPHHVHEWHKRVALHQGRPREIINTYTEAVQTVDPFKATGKPHTLWVAFAKFYEDNGQLDDARVILEKATKVNFKQVDDLASVWCQCGELELRHENYDEALRLLRKATALPARRAEYFDGSEPVQNRVYKSLKVWSMLADLEESLGTFQSTKAVYDRILDLRIATPQIVINYAMFLEEHKYFEESFKAYERGISLFKWPNVSDIWSTYLTKFIARYGGRKLERARDLFEQALDGCPPKYAKTLYLLYAQLEEEWGLARHAMAVYERATRAVEPAQQYDMFNIYIKRAAEIYGVTHTRGIYQKAIEVLSDEHAREMCLRFADMECKLGEIDRARAIYSFCSQICDPRTTGAFWQTWKDFEVRHGNEDTIKEMLRIRRSVQATYNTQVNFMASQMLKVSGSATGTVSDLAPGQSGMDDMKLLEQRAEQLAAEAERDQPLRAQSKILFVRSDASREELAELAQQVNPEEIQLGEDEDEDEMDLEPNEVRLEQQSVPAAVFGSLKED

SEQ ID NO: 4572 - protein, 989 aa, Homo sapiens
MSRGHGGSEMTEGRHCQVHLLDDRRLELLVQPKLLARELLDLVASHFNLKEKEYFGITFIDDTGQQNWLQLDHRVLDHDLPKKPGPTILHFAVRFYIESISFLKDKTTVELFFLNAKACVHKGQIEVESETIFKLAAFILQEAKGDYTSDENARKDLKTLPAFPTKTLQEHPSLAYCEDRVIEHYLKIKGLTRGQAVVQYMKIVEALPTYGVHYYAVKDKQGLPWWLGISYKGIGQYDIQDKVKPRKLFQWKQLENLYFREKKFAVEVHDPRRISVSRRTFGQSGLFVQTWYANSSLIKSIWVMAISQHQFYLDRKQSKAKIPSARSLDEIAMDLTETGTQRASKLVTLETKSQFIMASNGSLISSGSQDSEVSEEQKREKILELKKKEKLLQEKLLKKVEELKKICLREAELTGKMPKEYPLNIGEKPPQVRRRVGTAFKLDDNLLPSEEDPALQELESNFLIQQKLVEAAKKLANEPDLCKTVKKKRKQDYTDAMKKLQEIENAINEYRIRCGKKPSQKATVLPEDIIPSESSSLSDTTTYDDPSDAFTFPGQRSSSVPHSPRILPPKSLGIERIHFRKSSINEQFVDTRQSREMLSTHSSPYKTLERRPQGGRSMPTTPVLTRNAYSSSHLEPESSSQHCRQRSGSLESQSHLLSEMDSDKPFFSLSKSQRSSSTEILDDGSSYTSQSSTEYYCVTPVTGPYYTTQTLDTRTRGRRRSKKQNVSTSNSGSMPNLAQKDSLRNGVYSKSQEPPSSSYYIAGYTPYAECDFYYSGGYVYENDTEGQYSVNPSYRSSAHYGYERQRDYSRSFHEDEVDRVPHNPYATLRLPRKAAAKSEHITKNIHKALVAEHLRGWYQRASGQKDQGHSPQTSFDSDRGSQRCLGFAGLQVPCSPSSRASSYSSVSSTNASGNWRTQLTIGLSDYETPAHSSYTSCYGNVYNPLPSPSRQYTEISQLDGTDGNQLEDNLESSEQRLFWHEDSKPGTLV

SEQ ID NO: 4573 - protein, 264 aa, Homo sapiens
MTEGRHCQVHLLDDRRLELLVQPKLLARELLDLVASHFNLKEKEYFGITFIDDTGQQNWLQLDHRVLDHDLPKKPGPTILHFAVRFYIESISFLKDKTTVELFFLNAKACVHKGQIEVESETIFKLAAFILQEAKGDYTSDENARKDLKTLPAFPTKTLQEHPSLAYCEDRVIEHYLKIKGLTRGQAVVQYMKIVEALPTYGVHYYAVKDKQGLPWWLGISYKGIGQYDIQDKVKPRKLFQWKQLENLYFREKKFAVEVHDPRR

SEQ ID NO: 4574 - protein, 686 aa, Homo sapiens
MAISQHQFYLDRKQSKAKIPSARSLDEIAMDLTETGTQRASKLVTLETKSQFIMASNGSLISSGSQDSEVSEEQKREKILELKKKEKLLQEKLLKKVEELKKICLREAELTGKMPKEYPLNIGEKPPQVRRRVGTAFKLDDNLLPSEEDPALQELESNFLIQQKLVEAAKKLANEPDLCKTVKKKRKQDYTDAMKKLQEIENAINEYRIRCGKKPSQKATVLPEDIIPSESSSLSDTTTYDDPSDAFTFPGQRSSSVPHSPRILPPKSLGIERIHFRKSSINEQFVDTRQSREMLSTHSSPYKTLERRPQGGRSMPTTPVLTRNAYSSSHLEPESSSQHCRQRSGSLESQSHLLSEMDSDKPFFSLSKSQRSSSTEILDDGSSYTSQSSTEYYCVTPVTGPYYTTQTLDTRTRGRRRSKKQNVSTSNSGSMPNLAQKDSLRNGVYSKSQEPPSSSYYIAGYTPYAECDFYYSGGYVYENDTEGQYSVNPSYRSSAHYGYERQRDYSRSFHEDEVDRVPHNPYATLRLPRKAAAKSEHITKNIHKALVAEHLRGWYQRASGQKDQGHSPQTSFDSDRGSQRCLGFAGLQVPCSPSSRASSYSSVSSTNASGNWRTQLTIGLSDYETPAHSSYTSCYGNVYNPLPSPSRQYTEISQLDGTDGNQLEDNLESSEQRLFWHEDSKPGTLV

SEQ ID NO: 4575 - protein, 577 aa, Homo sapiens
MKKGTIVKKLLLTVDTTDDNFMPKRVVVYGGEGDNLKKLSDVSIDETLIGDVCVLEDMTVHLPIIEIRIVECRDDGIDVRLRGVKIKSSRQRELGLNADLFQPTSLVRYPRLEGTDPEVLYRRAVLLQRFIKILDSVLHHLVPAWDHTLGTFSEIKQVKQFLLLSRQRPGLVAQCLRDSESSKPSFMPRLYINRRLAMEHRACPSRDPACKNAVFTQVYEGLKPSDKYEKPLDYRWPMRYDQWWECKFIAEGIIDQGGGFRDSLADMSEELCPSSADTPVPLPFFVRTANQGNGTGEARDMYVPNPSCRDFAKYEWIGQLMGAALRGKEFLVLALPGFVWKQLSGEEVSWSKDFPAVDSVLVKLLEVMEGMDKETFEFKFGKELTFTTVLSDQQVVELIPGGAGIVVGYGDRSRFIQLVQKARLEESKEQVAAMQAGLLKVVPQAVLDLLTWQELEKKVCGDPEVTVDALRKLTRFEDFEPSDSRVQYFWEALNNFTNEDRSRFLRFVTGRSRLPARIYIYPDKLGYETTDALPESSTCSSTLFLPHYASAKVCEEKLRYAAYNCVAIDTDMSPWEE

SEQ ID NO: 4576 - protein, 1141 aa, Homo sapiens
MDDSGELGGLETMETLTELGDELTLGDIDEMLQFVSNQVGEFPDLFSEQLCSSFPGSGGSGSSSGSSGSSSSSSNGRGSSSGAVDPSVQRSFTQVTLPSFSPSAASPQAPTLQVKVSPTSVPTTPRATPILQPRPQPQPQPQTQLQQQTVMITPTFSTTPQTRIIQQPLIYQNAATSFQVLQPQVQSLVTSSQVQPVTIQQQVQTVQAQRVLTQTANGTLQTLAPATVQTVAAPQVQQVPVLVQPQIIKTDSLVLTTLKTDGSPVMAAVQNPALTALTTPIQTAALQVPTLVGSSGTILTTMPVMMGQEKVPIKQVPGGVKQLEPPKEGERRTTHNIIEKRYRSSINDKIIELKDLVMGTDAKMHKSGVLRKAIDYIKYLQQVNHKLRQENMVLKLANQKNKLLKGIDLGSLVDNEVDLKIEDFNQNVLLMSPPASDSGSQAGFSPYSIDSEPGSPLLDDAKVKDEPDSPPVALGMVDRSRILLCVLTFLCLSFNPLTSLLQWGGAHDSDQHPHSGSGRSVLSFESGSGGWFDWMMPTLLLWLVNGVIVLSVFVKLLVHGEPVIRPHSRSSVTFWRHRKQADLDLARGDFAAAAGNLQTCLAVLGRALPTSRLDLACSLSWNVIRYSLQKLRLVRWLLKKVFQCRRATPATEAGFEDEAKTSARDAALAYHRLHQLHITGKLPAGSACSDVHMALCAVNLAECAEEKIPPSTLVEIHLTAAMGLKTRCGGKLGFLASYFLSRAQSLCGPEHSAVPDSLRWLCHPLGQKFFMERSWSVKSAAKESLYCAQRNPADPIAQVHQAFCKNLLERAIESLVKPQAKKKAGDQEEESCEFSSALEYLKLLHSFVDSVGVMSPPLSRSSVLKSALGPDIICRWWTSAITVAISWLQGDDAAVRSHFTKVERIPKALEVTESPLVKAIFHACRAMHASLPGKADGQQSSFCHCERASGHLWSSLNVSGATSDPALNHVVQLLTCDLLLSLRTALWQKQASASQAVGETYHASGAELAGFQRDLGSLRRLAHSFRPAYRKVFLHEATVRLMAGASPTRTHQLLEHSLRRRTTQSTKHGEVDAWPGQRERATAILLACRHLPLSFLSSPGQRAVLLAEAARTLEKVGDRRSCNDCQQMIVKLGGGTAIAAS

SEQ ID NO: 4577 - protein, 689 aa, Homo sapiens
MKPPAACAGDMADAASPCSVVNDLRWDLSAQQIEERTRELIEQTKRVYDQVGTQEFEDVSYESTLKALADVEVTYTVQRNILDFPQHVSPSKDIRTASTEADKKLSEFDVEMSMREDVYQRIVWLQEKVQKDSLRPEAARYLERLIKLGRRNGLHLPRETQENIKRIKKKLSLLCIDFNKNLNEDTTFLPFTLQELGGLPEDFLNSLEKMEDGKLKVTLKYPHYFPLLKKCHVPETRRKVEEAFNCRCKEENCAILKELVTLRAQKSRLLGFHTHADYVLEMNMAKTSQTVATFLDELAQKLKPLGEQERAVILELKRAECERRGLPFDGRIRAWDMRYYMNQVEETRYCVDQNLLKEYFPVQVVTHGLLGIYQELLGLAFHHEEGASAWHEDVRLYTARDAASGEVVGKFYLDLYPREGKYGHAACFGLQPGCLRQDGSRQIAIAAMVANFTKPTADAPSLLQHDEVETYFHEFGHVMHQLCSQAEFAMFSGTHVERDFVEAPSQMLENWVWEQEPLLRMSRHYRTGSAVPRELLEKLIESRQANTGLFNLRQIVLAKVDQALHTQTDADPAEEYARLCQEILGVPATPGTNMPATFGHLAGGYDAQYYGYLWSEVYSMDMFHTRFKQEGVLNSKVGMDYRSCILRPGGSEDASAMLRRFLGRDPKQDAFLLSKGLQVGGCEPEPQVC

SEQ ID NO: 4578 - protein, 184 aa, Homo sapiens
MREYKLVVLGSGGVGKSALTVQFVQGIFVEKYDPTIEDSYRKQVEVDCQQCMLEILDTAGTEQFTAMRDLYMKNGQGFALVYSITAQSTFNDLQDLREQILRVKDTEDVPMILVGNKCDLEDERVVGKEQGQNLARQWCNCAFLESSAKSKINVNEIFYDLVRQINRKTPVEKKKPKKKSCLLL

SEQ ID NO: 4579 - protein, 184 aa, Homo sapiens; identical to SEQ ID NO: 4578

SEQ ID NO: 4580 - protein, 565 aa, Homo sapiens
MPQASEHRLGRTREPPVNIQPRVGSKLPFAPRARSKERRNPASGPNPMLRPLPPRPGLPDERLKKLELGRGRTSGPRPRGPLRADHGVPLPGSPPPTVALPLPSRTNLARSKSVSSGDLRPMGIALGGHRGTGELGAALSRLALRPEPPTLRRSTSLRRLGGFPGPPTLFSIRTEPPASHGSFHMISARSSEPFYSDDKMAHHTLLLGSGHVGLRNLGNTCFLNAVLQCLSSTRPLRDFCLRRDFRQEVPGGGRAQELTEAFADVIGALWHPDSCEAVNPTRFRAVFQKYVPSFSGYSQQDAQEFLKLLMERLHLEINRRGRRAPPILANGPVPSPPRRGGALLEEPELSDDDRANLMWKRYLEREDSKIVDLFVGQLKSCLKCQACGYRSTTFEVFCDLSLPIPKKGFAGGKVSLRDCFNLFTKEEELESENAPVCDRCRQKTRSTKKLTVQRFPRILVLHLNRFSASRGSIKKSSVGVDFPLQRLSLGDFASDKAGSPVYQLYALCNHSGSVHYGHYTALCRCQTGWHVYNDSRVSPVSENQVASSEGYVLFYQLMQEPPRCL

SEQ ID NO: 4581 - protein, 565 aa, Homo sapiens; identical to SEQ ID NO: 4580

SEQ ID NO: 4582 - protein, 354 aa, Homo sapiens
MCYVPSPVLASVGDTDDRFEDLEEANPFSFREFLKTKNLGLSKEDPASRIYAKEASRHSLGLDHNSPPSQTGGYGLEYQQPFFEDPTGAGDLLDGEEDEDTGWSGAYLPSAIEQTHPERVPAGTSPCSTYLSFFSTPSELAGPESLPSWALSDTDSRVSPASPAGSPSADFAVHGESLGDRHLRTLQISYDALKDENSKLRRKLNEVQSFSEAQTEMVRTLERKLEAKMIKEESDYHDLESVVQQVEQNLELMTKRAVKAENHVVKLKQEISLLQAQVSNFQRENEALRCGQGASLTVVKQNADVALQNLRVVMNSAQASIKQLVSGAETLNLVAEILKSIDRISEIKDEEEDS

SEQ ID NO: 4583 - protein, 566 aa, Homo sapiens
MEVPQPEPAPGSALSPAGVCGGAQRPGHLPGLLLGSHGLLGSPVRAAASSPVTTLTQTMHDLAGLGSRSRLTHLSLSRRASESSLSSESSESSDAGLCMDSPSPMDPHMAEQTFEQAIQAASRIIRNEQFAIRRFQSMPVRLLGHSPVLRNITNSQAPDGRRKSEAGSGAASSSGEDKENDGFVFKMPWKPTHPSSTHALAEWASRREAFAQRPSSAPDLMCLSPDRKMEVEELSPLALGRFSLTPAEGDTEEDDGFVDILESDLKDDDAVPPGMESLISAPLVKTLEKEEEKDLVMYSKCQRLFRSPSMPCSVIRPILKRLERPQDRDTPVQNKRRRSVTPPEEQQEAEEPKARVLRSKSLCHDEIENLLDSDHRELIGDYSKAFLLQTVDGKHQDLKYISPETMVALLTGKFSNIVDKFVIVDCRYPYEYEGGHIKTAVNLPLERDAESFLLKSPIAPCSLDKRVILIFHCEFSSERGPRMCRFIRERDRAVNDYPSLYYPEMYILKGGYKEFFPQHPNFCEPQDYRPMNHEAFKDELKTFRLKTRSWAGERSRRELCSRLQDQ

SEQ ID NO: 4584 - protein, 539 aa, Homo sapiens
MEVPQPEPAPGSALSPAGVCGGAQRPGHLPGLLLGSHGLLGSPVRAAASSPVTTLTQTMHDLAGLGSETPKSQVGTLLFRSRSRLTHLSLSRRASESSLSSESSESSDAGLCMDSPSPMDPHMAEQTFEQAIQAASRIIRNEQFAIRRFQSMPDGFVFKMPWKPTHPSSTHALAEWASRREAFAQRPSSAPDLMCLSPDRKMEVEELSPLALGRFSLTPAEGDTEEDDGFVDILESDLKDDDAVPPGMESLISAPLVKTLEKEEEKDLVMYSKCQRLFRSPSMPCSVIRPILKRLERPQDRDTPVQNKRRRSVTPPEEQQEAEEPKARVLRSKSLCHDEIENLLDSDHRELIGDYSKAFLLQTVDGKHQDLKYISPETMVALLTGKFSNIVDKFVIVDCRYPYEYEGGHIKTAVNLPLERDAESFLLKSPIAPCSLDKRVILIFHCEFSSERGPRMCRFIRERDRAVNDYPSLYYPEMYILKGGYKEFFPQHPNFCEPQDYRPMNHEAFKDELKTFRLKTRSWAGERSRRELCSRLQDQ

SEQ ID NO: 4585 - protein, 580 aa, Homo sapiens
MEVPQPEPAPGSALSPAGVCGGAQRPGHLPGLLLGSHGLLGSPVRAAASSPVTTLTQTMHDLAGLGSETPKSQVGTLLFRSRSRLTHLSLSRRASESSLSSESSESSDAGLCMDSPSPMDPHMAEQTFEQAIQAASRIIRNEQFAIRRFQSMPVRLLGHSPVLRNITNSQAPDGRRKSEAGSGAASSSGEDKENDGFVFKMPWKPTHPSSTHALAEWASRREAFAQRPSSAPDLMCLSPDRKMEVEELSPLALGRFSLTPAEGDTEEDDGFVDILESDLKDDDAVPPGMESLISAPLVKTLEKEEEKDLVMYSKCQRLFRSPSMPCSVIRPILKRLERPQDRDTPVQNKRRRSVTPPEEQQEAEEPKARVLRSKSLCHDEIENLLDSDHRELIGDYSKAFLLQTVDGKHQDLKYISPETMVALLTGKFSNIVDKFVIVDCRYPYEYEGGHIKTAVNLPLERDAESFLLKSPIAPCSLDKRVILIFHCEFSSERGPRMCRFIRERDRAVNDYPSLYYPEMYILKGGYKEFFPQHPNFCEPQDYRPMNHEAFKDELKTFRLKTRSWAGERSRRELCSRLQDQ

SEQ ID NO: 4586 - protein, 684 aa, Homo sapiens
MIPPQEASARRREIEDKLKQEEETLSFIRDSLEKSDQLTKNMVSILSSFESRLMKLENSIIPVHKQTENLQRLQENVEKTLSCLDHVISYYHVASDTEKIIREGPTGRLEEYLGSMAKIQKAVEYFQDNSPDSPELNKVKLLFERGKEALESEFRSLMTRHSKVVSPVLILDLISGDDDLEAQEDVTLEHLPESVLQDVIRISRWLVEYGRNQDFMNVYYQIRSSQLDRSIKGLKEHFHKSSSSSGVPYSPAIPNKRKDTPTKKPVKRPGTIRKAQNLLKQYSQHGLDGKKGGSNLIPLEGRDDMLDVETDAYIHCVSAFVKLAQSEYQLLADIIPEHHQKKTFDSLIQDALDGLMLEGENIVSAARKAIVRHDFSTVLTVFPILRHLKQTKPEFDQVLQGTAASTKNKLPGLITSMETIGAKALEDFADNIKNDPDKEYNMPKDGTVHELTSNAILFLQQLLDFQETAGAMLASQETSSSATSYSSEFSKRLLSTYICKVLGNLQLNLLSKSKVYEDPALSAIFLHNNYNYILKSLEKSELIQLVAVTQKTAERSYREHIEQQIQTYQRSWLKVTDYIAEKNLPVFQPGVKLRDKERQIIKERFKGFNDGLEELCKIQKAWAIPDTEQRDRIRQAQKTIVKETYGAFLQKFGSVPFTKNPEKYIKYGVEQVGDMIDRLFDTSA

SEQ ID NO: 4587 - protein, 653 aa, Homo sapiens
MIPPQEASARRREIEDKLKQEEETLSFIRDSLEKSDQLTKNMVSILSSFESRLMKLENSIIPVHKQTENLQRLQENVEKTLSCLDHVISYYHVASDTEKIIREGPTGRLEEYLGSMAKIQKAVEYFQDNSPDSPELNKVKLLFERGKEALESEFRSLMTRHSKVVSPVLILDLISGDDDLEAQEDVTLEHLPESVLQDVIRISRWLVEYGRNQDFMNVYYQIRSSQLDRSIKGLKEHFHKSSSSSGVPYSPAIPNKRKDTPTKKPVKRPGRDDMLDVETDAYIHCVSAFVKLAQSEYQLLADIIPEHHQKKTFDSLIQDALDGLMLEGENIVSAARKAIVRHDFSTVLTVFPILRHLKQTKPEFDQVLQGTAASTKNKLPGLITSMETIGAKALEDFADNIKNDPDKEYNMPKDGTVHELTSNAILFLQQLLDFQETAGAMLASQETSSSATSYSSEFSKRLLSTYICKVLGNLQLNLLSKSKVYEDPALSAIFLHNNYNYILKSLEKSELIQLVAVTQKTAERSYREHIEQQIQTYQRSWLKVTDYIAEKNLPVFQPGVKLRDKERQIIKERFKGFNDGLEELCKIQKAWAIPDTEQRDRIRQAQKTIVKETYGAFLQKFGSVPFTKNPEKYIKYGVEQVGDMIDRLFDTSA

SEQ ID NO: 4588 - protein, 753 aa, Homo sapiens
MMEERAAAAVAAAASSCRPLGSGAGPGPTGAAPVSAPAPGPGPAGKGGGGGGSPGPTAGPEPLSLPGILHFIQHEWARFEAEKARWEAERAELQAQVAFLQGERKGQENLKTDLVRRIKMLEYALKQERAKYHKLKFGTDLNQGEKKADVSEQVSNGPVESVTLENSPLVWKEGRQLLRQYLEEVGYTDTILDMRSKRVRSLLGRSLELNGAVEPSEGAPRAPPGPAGLSGGESLLVKQIEEQIKRNAAGKDGKERLGGSVLGQIPFLQNCEDEDSDEDDELDSVQHKKQRVKLPSKALVPEMEDEDEEDDSEDAINEFDFLGSGEDGEGAPDPRRCTVDGSPHELESRRVKLQGVLADLRDVDGLPPKVTGPPPGTPQPRPHEDVFIMDTIGGGEVSLGDLADLTVTNDNDLSCDLSDSKDAFKKTWNPKFTLRSHYDGIRSLAFHHSQSALLTASEDGTLKLWNLQKAVTAKKNAALDVEPIHAFRAHRGPVLAVAMGSNSEYCYSGGADACIHSWKIPDLSMDPYDGYDPSVLSHVLEGHGDAVWGLAFSPTSQRLASCSADGTVRIWDPSSSSPACLCTFPTASEHGVPTSVAFTSTEPAHIVASFRSGDTVLYDMEVGSALLTLESRGSSGPTQINQVVSHPNQPLTITAHDDRGIRFLDNRTGKPVHSMVAHLDAVTCLAVDPNGAFLMSGSHDCSLRLWSLDNKTCVQEITAHRKKHEEAIHAVACHPSKALIASAGADALAKVFV

SEQ ID NO: 4589 - protein, 689 aa, Homo sapiens
MATKTAGVGRWEVVKKGRRPGVGAGAGGRGGGRNRRALGEANGVWKYDLTPAIQTTSTLYERGFENIMKRQNKEQVPPPAVEPKKPGNKKQPKKVATPHNQNQKQGRFRSLEEALKALDVADLQKELDKSQSVFSGNQSIWLKDLASYLNYKLQAPLSEPTLSQHTHDYPYSLVSRELRGIIRGLLAKAAGSLELFFDHCLFTMLQELDKTPGESLHGYRICIQAILQDKPKIATANLGKFLELLRSHQSRPAKCLTIMWALGQAGFANLTEGLKVWLGIMLPVLGIKSLSPFAITYLDRLLLMHPNLTKGFGMIGPKDFFPLLDFAYMPNNSLTPSLQEQLCQLYPRLKVLAFGAKPDSTLHTYFPSFLSRATPSCPPEMKKELLSSLTECLTVDPLSASVWRQLYPKHLSQSSLLLEHLLSSWEQIPKKVQKSLQETIQSLKLTNQELLRKGSSNNQDVVTCDMACKGLLQQVQGPRLPWTRLLLLLLVFAVGFLCHDLRSHSSFQASLTGRLLRSSGFLPASQQACAKLYSYSLQGYSWLGETLPLWGSHLLTVVRPSLQLAWAHTNATVSFLSAHCASHLAWFGDSLTSLSQRLQIQLPDSVNQLLRYLRELPLLFHQNVLLPLWHLLLEALAWAQEHCHEACRGEVTWDCMKTQLSEAVHWTWLCLQDITVAFLDWALALISQQ

SEQ ID NO: 4590 - protein, 118 aa, Homo sapiens
MCDKEFMWALKNGDLDEVKDYVAKGEDVNRTLEGGRKPLHYAADCGQLEILEFLLLKGADINAPDKHHITPLLSAVYEGHVSCVKLLLSKGADKTVKGPDGLTAFEATDNQAIKALLQ

SEQ ID NO: 4591 - protein, 269 aa, Homo sapiens
MPLGLKPTCSVCKTTSSSMWKKGAQGEILCHHCTGRGGAGSGGAGSGAAGGTGGSGGGGFGAATFASTSATPPQSNGGGGGKQSKQEIHRRSARLRNTKYKSAPAAEKKVSTKGKGRRHIFKLKNPIKAPESVSTIITAESIFYKGVYYQIGDVVSVIDEQDGKPYYAQIRGFIQDQYCEKSAALTWLIPTLSSPRDQFDPASYIIGPEEDLPRKMEYLEFVCHAPSEYFKSRSSPFPTVPTRPEKGYIWTHVGPTPAITIKESVANHL

SEQ ID NO: 4592 - protein, 3000 aa, Homo sapiens
MKELELLCSMKEVSFDGNDLENMVLSLREKFLQEVNSLIQKPSHPLAKTKTLVKSLMNRAELLLHVTIAAQSGLTRSISGTPAETPACKSASETKVISHAVRQPVFLRSMSAPSDLEMIGNEDLEFTRANQRRRHVTSHRSSSFTLLQSLAIEDSRDKPTYSVLLGQLFAFIGTNPDQAVSSSSFLLAAQTRWRRGNTRKQALVHMRELLTAAVRVGGVTHLVGPVTMVLQGGPRIEELTCGGMVEQVQEAFGETMTSVVSLCARYPIACANSIGLLCTIPYTRSEEKCLVRSGLVQLMDRLCSLSNQTESSSSEKQTKKQKVATMAWAAFQVLANRCVEWEKEEGGSTEAVHSGLARQVSSLLTNHLARATECCGNQAAGNDALQDVLSLLNDLSRSHIGKAILSQPACVSKLLSLLLDQRPSPKLVLIILQLCRAALPLMSVEDCGNVELPPWSYSVPSLNSEQEDPSDPASKIASLLLAKLADYVVPGCQTVLSPTASEPDTTLTKTSPKNSLKGDKDPGEESEAVDGKLSIFIHKREDQSSHEVLQPLLSSSEGRPFRLGTGANMEKVVKMDRDMTKGGCCEVITEEAAAALRKATKWAQSGLIVSIGPPVESINPETVSGLSTGDKKKTAQTSICRERNSELARTDPVRPFISGHVANSMAAEVIALLHSLLMAPESNAAQIWTTTAEKVLSRALMYIPQLGKYAESILENGSSSGRKLAKLQRIARQAVAALCALGGFKETIKIGSEVQVLGRGISGSIGVVASINEQEGIATVRFPPIDCRKTSQASDTLTIPLSRLCVPRSEALPLHKLSITEKVVQAVQSMLLPQEGSLSIHTSLPATGDGSAPVMAVVRLLAEIRTRACLVMAQLLEDSLFCEEFIQQCPAAVEVLNLVAQECSAGERLAVVEVQCERLRMLYRDCARPPPPPLQADRRQPKEITWSPSRVFPPVRACMFSSHLTSVTFLADPSAGGGLPRGTFIYATSPLPVQAPSFYWEIEIVSYGDTDDDTGPIVSFGFTTEAEKRDGAWTNPVGTCLFHNNGRAVHYNGSSLLQWKSVRLDVTLSPGDVAGIGWERTEGTPPPPGQPAKGRVYFTYCGQRLSPYLEDVSGGMWPVVHIQKKNTKTRANFGSRPFAYAEGQAHRNAADLCTDLAEEISANFEALPFAMASDSDNDAGTSIASDPGTHGPPCRIAAVATAQQQYDSDTSCHYKVELSYENFITSGPDPHPPPIADDESDDDDDDDIPQEDHYALLVKAWETKVFPTIRRRFRNEAERKSGLDQIKGALQLGMVDIARQTVEFLYEENGGIPRDLYLPTIEDIKDEANKFTIDKVRKGLTVVTRSPDSNNVASSAVGTALPKFAIRGMLKTFGLHGVVLDVDSVNELVQVETYLRSEGVLVRYWYPIDMLERPPAGYRRTATNGLVTLDNTNLQIHRELLRCEAALARLYCRMALLNIFAPKLPHLFTRLFHIPAIRDITLEHLQLLSNQLLAPPLPDGTISSSSILLAQSLQHCIHSQNCSATDLFYQGNSQTVREWLNVAITRTLHQGEESLLELTKQICSFLQTAPEQFPSEEFPISESKVNMDVNFPGAAFVVVSCKESQSGFRKDSSLYKAPWARVLVYGLGHKVKRNGQLNLIEAACYPRDASPANTGLAPPPTADQYPSVVLSTDRVHIKLGVSPPPGAVLVLHSLPLEFPLAMAFAEQLLSWKSEDSEGKSEDEPDTIPTSVLLQVVELLGNFLWTTDMAACVKELVFHLLAELLRTVHTLEQRRHPAGLSSSIALQLNPCLAMLMALQSELHKLYDEETQNWVSGGACGGSGGAAAGDQGRFSTYFHALMEGCLAVAEVTLPTNMSVTASGVTSATAPNLSDSSSSSSSSPGQTPQSPSLLSKRKKVKMKREKASSSGKRQSSRTVDSDPTVLSIGGSKPEDMLWFHRALTLLIILRHLTRKDPQGLGVTSDAIADACQALVGPTAHSRLLVISGIPTHLDEGVVRGAIRKACNAHGGVFKDEIYIPLQEEDTKKPKDKAEGGDGKVEPEKTLAFPGTDSMEVSTSSSLTPAMSISASASTSQASICSSQGISQTVSDLSVDPLPAGLELPIPPGLLEPHAVSSQESLDISLCSTGSLGSLGSLGEPLDNAETASVSDMGSMYTVTSLDNQPLAARPIKGFAVVEIRSRAKIEKIRASLFNNNDLIGLSSLDGEDELMEMSTEEILTVSVVNQSLFDTQGSPGLEDYFNDKSIKGEKLVPGAREVLTEIFKSCAHSEQTLSLTPAKPIRVSDIYLSKEQINSQTPGNLLHLFFTNVRPPKKVLEDQLTQILRKYGVPKPKFDKSKYSKAGKEQHPVKVVSTKRPITKPPAKDKAVLNSVSRTALSEKKPTVKPKSPEKSKPDEKDPEKSPTKKQEVPEEKYLTLEGFHKFVIDRARQDIRSVWRAILSCGYDLHFERCACIDVRHAQKASRKWTLEMDVALVQYINQLCRHLAITPARLHPHEVYLDPADAADPRVACLLNVPIESLRLRFALLQSLNTTLETFFLPLVELRQTPMYTHSIAALLKEAKGLIFYDTKVTVMNRVLNATVQRTADHAAPEITLDPLEIVGGEIRASENSYFCQAARQLASVPSSQLCVKLASGGDPTYAFNIRFTGEEVHGTSGSFRHFLWQVCKELQSSSLSLLLLCPSSAVNKNKGKYILTPSPITYGEEQLLHFLGQLLGIAIRADVPLPLDLLPSFWKTLVGEPLDPEQDLQEADILTYNYVKKFESINDETELEALCAEIASQHLATESPDSPNKPCCRFTYLTMTGEEVELCSRGRHILVAWENKDIYAAAIRSLRLRELQNVECVTAVRAGLGSIIPLQLLTMLSPLEMELRTCGLPYINLEFLKAHTMYQVGLMETDQHIEFFWGALEMFTQEELCKFIKFACNQERIPFTCPCKDGGPDTAHVPPYPMKIAPPDGTAGSPDSRYIRVETCMFMIKLPQYSSLEIMLEKLRCAIHYREDPLSG

SEQ ID NO: 4593 - protein, 2602 aa, Homo sapiens
MKELELLCSMKEVSFDGNDLENMVLSLREKFLQEVNSLIQKPSHPLAKTKTLVKSLMNRAELLLHVTIAAQSGLTRSISGTPAETPACKSASETKVISHAVRQPVFLRSMSAPSDLEMIGNEDLEFTRANQRRRHVTSHRSSSFTLLQSLAIEDSRDKPTYSVLLGQLFAFIGTNPDQAVSSSSFLLAAQTRWRRGNTRKQALVHMRELLTAAVRVGGVTHLVGPVTMVLQGGPRIEELTCGGMVEQVQEAFGETMTSVVSLCARYPIACANSIGLLCTIPYTRSEEKCLVRSGLVQLMDRLCSLSNQTESSSSEKQTKKQKVATMAWAAFQVLANRCVEWEKEEGGSTEAVHSGLARQVSSLLTNHLARATECCGNQAAGNDALQDVLSLLNDLSRSHIGKAILSQPACVSKLLSLLLDQRPSPKLVLIILQLCRAALPLMSVEDCGNVELPPWSYSVPSLNSEQEDPSDPASKIASLLLAKLADYVVPGCQTVLSPTASEPDTTLTKTSPKNSLKGDKDPGEESEAVDGKLSIFIHKREDQSSHEVLQPLLSSSEGRPFRLGTGANMEKVVKMDRDMTKGGCCEVITEEAAAALRKATKWAQSGLIVSIGPPVESINPETVSGLSTGDKKKTAQTSICRERNSELARTDPVRPFISGHVANSMAAEVIALLHSLLMAPESNAAQIWTTTAEKVLSRALMYIPQLGKYAESILENGSSSGRKLAKLQRIARQAVAALCALGGFKETIKIGSEVQVLGRGISGSIGVVASINEQEGIATVRFPPIDCRKTSQASDTLTIPLSRLCVPRSEALPLHKLSITEKVVQAVQSMLLPQEGSLSIHTSLPATGDGSAPVMAVVRLLAEIRTRACLVMAQLLEDSLFCEEFIQQCPAAVEVLNLVAQECSAGERLAVVEVQCERLRMLYRDCARPPPPPLQADRRQPKEITWSPSRVFPPVRACMFSSHLTSVTFLADPSAGGGLPRGTFIYATSPLPVQAPSFYWEIEIVSYGDTDDDTGPIVSFGFTTEAEKRDGAWTNPVGTCLFHNNGRAVHYNGSSLLQWKSVRLDVTLSPGDVAGIGWERTEGTPPPPGQPAKGRVYFTYCGQRLSPYLEDVSGGMWPVVHIQKKNTKTRANFGSRPFAYAEGQAHRNAADLCTDLAEEISANFEALPFAMASDSDNDAGTSIASDPGTHGPPCRIAAVATAQQQYDSDTSCHYKVELSYENFITSGPDPHPPPIADDESDDDDDDDIPQEDHYALLVKAWETKVFPTIRRRFRNEAERKSGLDQIKGALQLGMVDIARQTVEFLYEENGGIPRDLYLPTIEDIKDEANKFTIDKVRKGLTVVTRSPDSNNVASSAVGTALPKFAIRGMLKTFGLHGVVLDVDSVNELVQVETYLRSEGVLVRYWYPIDMLERPPAGYRRTATNGLVTLDNTNLQIHRELLRCEAALARLYCRMALLNIFAPKLPHLFTRLFHIPAIRDITLEHLQLLSNQLLAPPLPDGTISSSSILLAQSLQHCIHSQNCSATDLFYQGNSQTVREWLNVAITRTLHQGEESLLELTKQICSFLQTAPEQFPSEEFPISESKVNMDVNFPGAAFVVVSCKESQSGFRKDSSLYKAPWARVLVYGLGHKVKRNGQLNLIEAACYPRDASPANTGLAPPPTADQYPSVVLSTDRVHIKLGVSPPPGAVLVLHSLPLEFPLAMAFAEQLLSWKSEDSEGKSEDEPDTIPTSVLLQVVELLGNFLWTTDMAACVKELVFHLLAELLRTVHTLEQRRHPAGLSSSIALQLNPCLAMLMALQSELHKLYDEETQNWVSGGACGGSGGAAAGDQGRFSTYFHALMEGCLAVAEVTLPTNMSVTASGVTSATAPNLSDSSSSSSSSPGQTPQSPSLLSKRKKVKMKREKASSSGKRQSSRTVDSDPTVLSIGGSKPEDMLWFHRALTLLIILRHLTRKDPQGLGVTSDAIADACQALVGPTAHSRLLVISGIPTHLDEGVVRGAIRKACNAHGGVFKDEIYIPLQEEDTKKPKDKAEGGDGKVEPEKTLAFPGTDSMEVSTSSSLTPAMSISASASTSQASICSSQGISQTVSDLSVDPLPAGLELPIPPGLLEPHAVSSQESLDISLCSTGSLGSLGSLGEPLDNAETASVSDMGSMYTVTSLDNQPLAARPIKGFAVVEIRSRAKIEKIRASLFNNNDLIGLSSLDGEDELMEMSTEEILTVSVVNQSLFDTQGSPGLEDYFNDKSIKGEKLVPGAREVLTEIFKSCAHSEQTLSLTPAKPIRVSDIYLSKEQINSQTPGNLLHLFFTNVRPPKKVLEDQLTQILRKYGVPKPKFDKSKYSKAGKEQHPVKVVSTKRPITKPPAKDKAVLNSVRTALSEKKPTVKPKSPEKSKPDEKDPEKSPTKKQEVPEEKYLTLEGFHKFVIDRARQDIRSVWRAILSCGYDLHFERCACIDVRHAQKASRKWTLEMDVALVQYINQLCRHLAITPARLHPHEVYLDPADAADPRVACLLNVPIESLRLRFALLQSLNTTLETFFLPLVELRQTPMYTHSIAALLKEAKGQCLHLPWPCRKREVTCKTPGPESTGSVLGQPRQEDATPPQPFM

SEQ ID NO: 4594 - protein, 2779 aa, Homo sapiens
MKELELLCSMKEVSFDGNDLENMVLSLREKFLQEVNSLIQKPSHPLAKTKTLVKSLMNRAELLLHVTIAAQSGLTRSISGTPAETPACKSASETKVISHAVRQPVFLRSMSAPSDLEMIGNEDLEFTRANQRRRHVTSHRSSSFTLLQSLAIEDSRDKPTYSVLLGQLFAFIGTNPDQAVSSSSFLLAAQTRWRRGNTRKQALVHMRELLTAAVRVGGVTHLVGPVTMVLQGGPRIEELTCGGMVEQVQEAFGETMTSVVSLCARYPIACANSIGLLCTIPYTRSEEKCLVRSGLVQLMDRLCSLSNQTESSSSEKQTKKQKVATMAWAAFQVLANRCVEWEKEEGGSTEAVHSGLARQVSSLLTNHLARATECCGNQAAGNDALQDVLSLLNDLSRSHIGKAILSQPACVSKLLSLLLDQRPSPKLVLIILQLCRAALPLMSVEDCGNVELPPWSYSVPSLNSEQEDPSDPASKIASLLLAKLADYVVPGCQTVLSPTASEPDTTLTKTSPKNSLKGDKDPGEESEAVDGKLSIFIHKREDQSSHEVLQPLLSSSEGRPFRLGTGANMEKVVKMDRDMTKGGCCEVITEEAAAALRKATKWAQSGLIVSIGPPVESINPETVSGLSTGDKKKTAQTSICRERNSELARTDPVRPFISGHVANSMAAEVIALLHSLLMAPESNAAQIWTTTAEKVLSRALMYIPQLGKYAESILENGSSSGRKLAKLQRIARQAVAALCALGGFKETIKIGSEVQVLGRGISGSIGVVASINEQEGIATVRFPPIDCRKTSQASDTLTIPLSRLCVPRSEALPLHKLSITEKVVQAVQSMLLPQEGSLSIHTSLPATGDGSAPVMAVVRLLAEIRTRACLVMAQLLEDSLFCEEFIQQCPAAVEVLNLVAQECSAGERLAVVEVQCERLRMLYRDCARPPPPPLQADRRQPKEITWSPSRVFPPVRACMFSSHLTSVTFLADPSAGGGLPRGTFIYATSPLPVQAPSFYWEIEIVSYGDTDDDTGPIVSFGFTTEAEKRDGAWTNPVGTCLFHNNGRAVHYNGSSLLQWKSVRLDVTLSPGDVAGIGWERTEGTPPPPGQPAKGRVYFTYCGQRLSPYLEDVSGGMWPVVHIQKKNTKTRANFGSRPFAYAEGQAHRNAADLCTDLAEEISANFEALPFAMASDSDNDAGTSIASDPGTHGPPCRIAAVATAQQQYDSDTSCHYKVELSYENFITSGPDPHPPPIADDESDDDDDDDIPQEDHYALLVKAWETKVFPTIRRRFRNEAERKSGLDQIKGALQLGMVDIARQTVEFLYEENGGIPRDLYLPTIEDIKDEANKFTIDKVRKGLTVVTRSPDSNNVASSAVGTALPKFAIRGMLKTFGLHGVVLDVDSVNELVQVETYLRSEGVLVRYWYPIDMLERPPAGYRRTATNGLVTLDNTNLQIHRELLRCEAALARLYCRMALLNIFAPKLPHLFTRLFHIPAIRDITLEHLQLLSNQLLAPPLPDGTISSSSILLAQSLQHCIHSQNCSATDLFYQGNSQTVREWLNVAITRTLHQGEESLLELTKQICSFLQTAPEQFPSEEFPISESKVNMDVNFPGAAFVVVSCKESQSGFRKDSSLYKAPWARVLVYGLGHKVKRNGQLNLIEAACYPRDASPANTGLAPPPTADQYPSVVLSTDRVHIKLGVSPPPGAVLVLHSLPLEFPLAMAFAEQLLSWKSEDSEGKSEDEPDTIPTSVLLQVVELLGNFLWTTDMAACVKELVFHLLAELLRTVHTLEQRRHPAGLSSSIALQLNPCLAMLMALQSELHKLYDEETQNWVSGGACGGSGGAAAGDQGRFSTYFHALMEGCLAVAEVTLPTNMSVTASGVTSATAPNLSDSSSSSSSSPGQTPQSPSLLSKRKKVKMKREKASSSGKRQSSRTVDSDPTVLSIGGSKPEDMLWFHRALTLLIILRHLTRKDPQGLGVTSDAIADACQALVGPTAHSRLLVISGIPTHLDEGVVRGAIRKACNAHGGVFKDEIYIPLQEEDTKKPKDKAEGGDGKVEPEKTLAFPGTDSMEVSTSSSLTPAMSISASASTSQASICSSQGISQTVSDLSVDPLPAGLELPIPPGLLEPHAVSSQESLDISLCSTGSLGSLGSLGEPLDNAETASVSDMGSMYTVTSLDNQPLAARPIKGFAVVEIRSRAKIEKIRASLFNNNDLIGLSSLDGEDELMEMSTEEILTVSVVNQSLFDTQGSPGLEDYFNDKSIKGEKLVPGAREVLTEIFKSCAHSEQTLSLTPAKPIRVSDIYLSKEQINSQTPGNLLHLFFTNVRPPKKVLEDQLTQILRKYGVPKPKFDKSKYSKAGKEQHPVKVVSTKRPITKPPAKDKAVLNSVRTALSEKKPTVKPKSPEKSKPDEKDPEKSPTKKQEVPEEKYLTLEGFHKFVIDRARQDIRSVWRAILSCGYDLHFERCACIDVRHAQKASRKWTLEMDVALVQYINQLCRHLAITPARLHPHEVYLDPADAADPRVACLLNVPIESLRLRFALLQSLNTTLETFFLPLVELRQTPMYTHSIAALLKEAKGLIFYDTKVTVMNRVLNATVQRTADHAAPEITLDPLEIVGGEIRASENSYFCQAARQLASVPSSQLCVKLASGGDPTYAFNIRFTGEEVHGTSGSFRHFLWQVCKELQSSSLSLLLLCPSSAVNKNKGKYILTPSPITYGEEQLLHFLGQLLGIAIRADVPLPLDLLPSFWKTLVGEPLDPEQDLQEADILTYNYVKKFESVSARHSSGGLQNPGPPRHLA

SEQ ID NO: 4595 - protein, 400 aa, Homo sapiens
MASDSDNDAGTSIASDPGTHGPPCRIAAVATAQQQYDSDTSCHYKVELSYENFITSGPDPHPPPIADDESDDDDDDDIPQEDHYALLVKAWETKVFPTIRRRFRNEAERKSGLDQIKGALQLGMVDIARQTVEFLYEENGGIPRDLYLPTIEDIKDEANKFTIDKVRKGLTVVTRSPDSNNVASSAVGTALPKFAIRGMLKTFGLHGVVLDVDSVNELVQVETYLRSEGVLVRYWYPIDMLERPPAGYRRTATNGLVTLDNTNLQIHRELLRCEAALARLYCRMALLNIFAPKLPHLFTRLFHIPAIRDITLEHLQLLSNQLLAPPLPDGTISSSSILLAQSLQHCIHSQNCSATDLFYQGNSQTVREWLNVAITRTLHQGEESLLELTKQICSFLQVEV

SEQ ID NO: 4596 - protein, 2999 aa, Homo sapiens
MKELELLCSMKEVSFDGNDLENMVLSLREKFLQEVNSLIQKPSHPLAKTKTLVKSLMNRAELLLHVTIAAQSGLTRSISGTPAETPACKSASETKVISHAVRQPVFLRSMSAPSDLEMIGNEDLEFTRANQRRRHVTSHRSSSFTLLQSLAIEDSRDKPTYSVLLGQLFAFIGTNPDQAVSSSSFLLAAQTRWRRGNTRKQALVHMRELLTAAVRVGGVTHLVGPVTMVLQGGPRIEELTCGGMVEQVQEAFGETMTSVVSLCARYPIACANSIGLLCTIPYTRSEEKCLVRSGLVQLMDRLCSLSNQTESSSSEKQTKKQKVATMAWAAFQVLANRCVEWEKEEGGSTEAVHSGLARQVSSLLTNHLARATECCGNQAAGNDALQDVLSLLNDLSRSHIGKAILSQPACVSKLLSLLLDQRPSPKLVLIILQLCRAALPLMSVEDCGNVELPPWSYSVPSLNSEQEDPSDPASKIASLLLAKLADYVVPGCQTVLSPTASEPDTTLTKTSPKNSLKGDKDPGEESEAVDGKLSIFIHKREDQSSHEVLQPLLSSSEGRPFRLGTGANMEKVVKMDRDMTKGGCCEVITEEAAAALRKATKWAQSGLIVSIGPPVESINPETVSGLSTGDKKKTAQTSICRERNSELARTDPVRPFISGHVANSMAAEVIALLHSLLMAPESNAAQIWTTTAEKVLSRALMYIPQLGKYAESILENGSSSGRKLAKLQRIARQAVAALCALGGFKETIKIGSEVQVLGRGISGSIGVVASINEQEGIATVRFPPIDCRKTSQASDTLTIPLSRLCVPRSEALPLHKLSITEKVVQAVQSMLLPQEGSLSIHTSLPATGDGSAPVMAVVRLLAEIRTRACLVMAQLLEDSLFCEEFIQQCPAAVEVLNLVAQECSAGERLAVVEVQCERLRMLYRDCARPPPPPLQADRRQPKEITWSPSRVFPPVRACMFSSHLTSVTFLADPSAGGGLPRGTFIYATSPLPVQAPSFYWEIEIVSYGDTDDDTGPIVSFGFTTEAEKRDGAWTNPVGTCLFHNNGRAVHYNGSSLLQWKSVRLDVTLSPGDVAGIGWERTEGTPPPPGQPAKGRVYFTYCGQRLSPYLEDVSGGMWPVVHIQKKNTKTRANFGSRPFAYAEGQAHRNAADLCTDLAEEISANFEALPFAMASDSDNDAGTSIASDPGTHGPPCRIAAVATAQQQYDSDTSCHYKVELSYENFITSGPDPHPPPIADDESDDDDDDDIPQEDHYALLVKAWETKVFPTIRRRFRNEAERKSGLDQIKGALQLGMVDIARQTVEFLYEENGGIPRDLYLPTIEDIKDEANKFTIDKVRKGLTVVTRSPDSNNVASSAVGTALPKFAIRGMLKTFGLHGVVLDVDSVNELVQVETYLRSEGVLVRYWYPIDMLERPPAGYRRTATNGLVTLDNTNLQIHRELLRCEAALARLYCRMALLNIFAPKLPHLFTRLFHIPAIRDITLEHLQLLSNQLLAPPLPDGTISSSSILLAQSLQHCIHSQNCSATDLFYQGNSQTVREWLNVAITRTLHQGEESLLELTKQICSFLQTAPEQFPSEEFPISESKVNMDVNFPGAAFVVVSCKESQSGFRKDSSLYKAPWARVLVYGLGHKVKRNGQLNLIEAACYPRDASPANTGLAPPPTADQYPSVVLSTDRVHIKLGVSPPPGAVLVLHSLPLEFPLAMAFAEQLLSWKSEDSEGKSEDEPDTIPTSVLLQVVELLGNFLWTTDMAACVKELVFHLLAELLRTVHTLEQRRHPAGLSSSIALQLNPCLAMLMALQSELHKLYDEETQNWVSGGACGGSGGAAAGDQGRFSTYFHALMEGCLAVAEVTLPTNMSVTASGVTSATAPNLSDSSSSSSSSPGQTPQSPSLLSKRKKVKMKREKASSSGKRQSSRTVDSDPTVLSIGGSKPEDMLWFHRALTLLIILRHLTRKDPQGLGVTSDAIADACQALVGPTAHSRLLVISGIPTHLDEGVVRGAIRKACNAHGGVFKDEIYIPLQEEDTKKPKDKAEGGDGKVEPEKTLAFPGTDSMEVSTSSSLTPAMSISASASTSQASICSSQGISQTVSDLSVDPLPAGLELPIPPGLLEPHAVSSQESLDISLCSTGSLGSLGSLGEPLDNAETASVSDMGSMYTVTSLDNQPLAARPIKGFAVVEIRSRAKIEKIRASLFNNNDLIGLSSLDGEDELMEMSTEEILTVSVVNQSLFDTQGSPGLEDYFNDKSIKGEKLVPGAREVLTEIFKSCAHSEQTLSLTPAKPIRVSDIYLSKEQINSQTPGNLLHLFFTNVRPPKKVLEDQLTQILRKYGVPKPKFDKSKYSKAGKEQHPVKVVSTKRPITKPPAKDKAVLNSVRTALSEKKPTVKPKSPEKSKPDEKDPEKSPTKKQEVPEEKYLTLEGFHKFVIDRARQDIRSVWRAILSCGYDLHFERCACIDVRHAQKASRKWTLEMDVALVQYINQLCRHLAITPARLHPHEVYLDPADAADPRVACLLNVPIESLRLRFALLQSLNTTLETFFLPLVELRQTPMYTHSIAALLKEAKGLIFYDTKVTVMNRVLNATVQRTADHAAPEITLDPLEIVGGEIRASENSYFCQAARQLASVPSSQLCVKLASGGDPTYAFNIRFTGEEVHGTSGSFRHFLWQVCKELQSSSLSLLLLCPSSAVNKNKGKYILTPSPITYGEEQLLHFLGQLLGIAIRADVPLPLDLLPSFWKTLVGEPLDPEQDLQEADILTYNYVKKFESINDETELEALCAEIASQHLATESPDSPNKPCCRFTYLTMTGEEVELCSRGRHILVAWENKDIYAAAIRSLRLRELQNVECVTAVRAGLGSIIPLQLLTMLSPLEMELRTCGLPYINLEFLKAHTMYQVGLMETDQHIEFFWGALEMFTQEELCKFIKFACNQERIPFTCPCKDGGPDTAHVPPYPMKIAPPDGTAGSPDSRYIRVETCMFMIKLPQYSSLEIMLEKLRCAIHYREDPLSG

SEQ ID NO: 4597 - protein, 2999 aa, Homo sapiens; identical to SEQ ID NO: 4596

SEQ ID NO: 4598 - protein, 2964 aa, Homo sapiens
MKELELLCSMKEVSFDGNDLENMVLSLREKFLQEVNSLIQKPSHPLAKTKTLVKSLMNRAELLLHVTIAAQSGLTRSISGTPAETPACKSASETKVISHAVRQPVFLRSMSAPSDLEMIGNEDLEFTRANQRRRHVTSHRSSSFTLLQSLAIEDSRDKPTYSVLLGQLFAFIGTNPDQAVSSSSFLLAAQTRWRRGNTRKQALVHMRELLTAAVRVGGVTHLVGPVTMVLQGGPRIEELTCGGMVEQVQEAFGETMTSVVSLCARYPIACANSIGLLCTIPYTRSEEKCLVRSGLVQLMDRLCSLSNQTESSSSEKQTKKQKVATMAWAAFQVLANRCVEWEKEEGGSTEAVHSGLARQVSSLLTNHLARATECCGNQAAGNDALQDVLSLLNDLSRSHIGKAILSQPACVSKLLSLLLDQRPSPKLVLIILQLCRAALPLMSVEDCGNVELPPWSYSVPSLNSEQEDPSDPASKIASLLLAKLADYVVPGCQTVLSPTASEPDTTLTKTSPKNSLKGDKDPGEESEAVDGKLSIFIHKREDQSSHEVLQPLLSSSEGRPFRLGTGANMEKVVKMDRDMTKGGCCEVITEEAAAALRKATKWAQSGLIVSIGPPVESINPETVSGLSTGDKKKTAQTSICRERNSELARTDPVRPFISGHVANSMAAEVIALLHSLLMAPESNAAQIWTTTAEKVLSRALMYIPQLGKYAESILENGSSSGRKLAKLQRIARQAVAALCALGGFKETIKIGSEVQVLGRGISGSIGVVASINEQEGIATVRFPPIDCRKTSQASDTLTIPLSRLCVPRSEALPLHKLSITEKVVQAVQSMLLPQEGSLSIHTSLPATGDGSAPVMAVVRLLAEIRTRACLVMAQLLEDSLFCEEFIQQCPAAVEVLNLVAQECSAGERLAVVEVQCERLRMLYRDCARPPPPPLQADRRQPKEITWSPSRVFPPVRACMFSSHLTSVTFLADPSAGGGLPRGTFIYATSPLPVQAPSFYWEIEIVSYGDTDDDTGPIVSFGFTTEAEKRDGAWTNPVGTCLFHNNGRAVHYNGSSLLQWKSVRLDVTLSPGDVAGIGWERTEGTPPPPGQPAKGRVYFTYCGQRLSPYLEDVSGGMWPVVHIQKKNTKTRANFGSRPFAYAEGQAHRNAADLCTDLAEEISANFEALPFAMASDSDNDAGTSIASDPGTHGPPCRIAAVATAQQQYDSDTSCHYKVELSYENFITSGPDPHPPPIADDESDDDDDDDIPQEDHYALLVKAWETKVFPTIRRRFRNEAERKSGLDQIKGALQLGMVDIARQTVEFLYEENGGIPRDLYLPTIEDIKDEANKFTIDKVRKGLTVVTRSPDSNNVASSAVGTALPKFAIRGMLKTFGLHGVVLDVDSVNELVQVETYLRSEGVLVRYWYPIDMLERPPAGYRRTATNGLVTLDNTNLQIHRELLRCEAALARLYCRMALLNIFAPKLPHLFTRLFHIPAIRDITLEHLQLLSNQLLAPPLPDGTISSSSILLAQSLQHCIHSQNCSATDLFYQGNSQTVREWLNVAITRTLHQGEESLLELTKQICSFLQTAPEQFPSEEFPISESKVNMDVNFPGAAFVVVSCKESQSGFRKDSSLYKAPWARVLVYGLGHKVKRNGQLNLIEAACYPRDASPANTGLAPPPTADQYPSVVLSTDRVHIKLGVSPPPGAVLVLHSLPLEFPLAMAFAEQLLSWKSEDSEGKSEDEPDTIPTSVLLQVVELLGNFLWTTDMAACVKELVFHLLAELLRTVHTLEQRRHPAGLSSSIALQLNPCLAMLMALQSELHKLYDEETQNWVSGGACGGSGGAAAGDQGRFSTYFHALMEGCLAVAEVTLPTNMSVTASGVTSATAPNLSDSSSSSSSSPGQTPQSPSLLSKRKKVKMKREKASSSGKRQSSRTVDSDPTVLSIGGSKPEDMLWFHRALTLLIILRHLTRKDPQGLGVTSDAIADACQALVGPTAHSRLLVISGIPTHLDEGVVRGAIRKACNAHGGVFKDEIYIPLQEEDTKKPKDKAEGGDGKVEPEKTLAFPGTDSMEVSTSSSLTPAMSISASASTSQASICSSQGISQTVSDLSVDPLPAGLELPIPPGLLEPHAVSSQESLDISLCSTGSLGSLGSLGEPLDNAETASVSDMGSMYTVTSLDNQPLAARPIKGFAVVEIRSRAKIEKIRASLFNNNDLIGLSSLDGEDELMEMSTEEILTVSVVNQSLFDTQGSPGLEDYFNDKSIKGEKLVPGAREVLTEIFKSCAHSEQTLSLTPAKPIRVSDIYLSKEQINSQTPGNLLHLFFTNVRPPKKVLEDQLTQILRKYGVPKPKFDKSKYSKAGKEQHPVKVVSTKRPITKPPAKDKAVLNSVRTALSEKKPTVKPKSPEKSKPDEKDPEKSPTKKQEVPEEKYLTLEGFHKFVIDRARQDIRSVWRAILSCGYDLHFERCACIDVRHAQKASRKWTLEMDVALVQYINQLCRHLAITPARLHPHEVYLDPADAADPRVACLLNVPIESLRLRFALLQSLNTTLETFFLPLVELRQTPMYTHSIAALLKEAKGLIFYDTKVTVMNRVLNATVQRTADHAAPEITLDPLEIVGGEIRASENSYFCQAARQLASVPSSQLCVKLASGGDPTYAFNIRFTGEEVHGTSGSFRHFLWQVCKELQSSSLSLLLLCPSSAVNKNKGKYILTPSPITYGEEQLLHFLGQLLGIAIRADVPLPLDLLPSFWKTLVGEPLDPEQDLQEADILTYNYVKKFESINDETELEALCAEIASQHLATESPDSPNKPCCRFTYLTMTGEEVELCSRGRHILVAWENKDIYAAAIRSLRLRELQNVECVTAVRAGLGSIIPLQLLTMLSPLEMELRTCGLPYINLEFLKAHTMYQVGLMETDQHIEFFWGALEMFTQEELCKFIKFACNQERIPFTCPCKDGGPDTAHVPPYPMKIAPPDGTAGTALPWPCPK

SEQ ID NO: 4599 - protein, 3000 aa, Homo sapiens; identical to SEQ ID NO: 4592

SEQ ID NO: 4600 - protein, 3000 aa, Homo sapiens; identical to SEQ ID NO: 4592

SEQ ID NO: 4601 - protein, 3000 aa, Homo sapiens; identical to SEQ ID NO: 4592

SEQ ID NO: 4602 - protein, 732 aa, Homo sapiens
MTEGTCLRRRGGPYKTEPATDLGRWRLNCERGRQTWTYLQDERAGREQTGLEAYALGLDTKNYFKDLPKAHTAFEGALNGMTFYVGLQAEDGHWTGDYGGPLFLLPGLLITCHVARIPLPAGYREEIVRYLRSVQLPDGGWGLHIEDKSTVFGTALNYVSLRILGVGPDDPDLVRARNILHKKGGAVAIPSWGKFWLAVLNVYSWEGLNTLFPEMWLFPDWAPAHPSTLWCHCRQVYLPMSYCYAVRLSAAEDPLVQSLRQELYVEDFASIDWLAQRNNVAPDELYTPHSWLLRVVYALLNLYEHHHSAHLRQRAVQKLYEHIVADDRFTKSISIGPISKTINMLVRWYVDGPASTAFQEHVSRIPDYLWMGLDGMKMQGTNGSQIWDTAFAIQALLEAGGHHRPEFSSCLQKAHEFLRLSQVPDNPPDYQKYYRQMRKGGFSFSTLDCGWIVSDCTAEALKAVLLLQEKCPHVTEHIPRERLCDAVAVLLNMRNPDGGFATYETKRGGHLLELLNPSEVFGDIMIDYTYVECTSAVMQALKYFHKRFPEHRAAEIRETLTQGLEFCRRQQRADGSWEGSWGVCFTYGTWFGLEAFACMGQTYRDGTACAEVSRACDFLLSRQMADGGWGEDFESCEERRYLQSAQSQIHNTCWAMMGLMAVRHPDIEAQERGVRCLLEKQLPNGDWPQENIAGVFNKSCAISYTSYRNIFPIWALGRFSQLYPERALAGHP

SEQ ID NO: 4603 - protein, 732 aa, Homo sapiens; identical to SEQ ID NO: 4602

SEQ ID NO: 4604 - protein, 377 aa, Homo sapiens
MASSEQAEQPSQPSSTPGSENVLPREPLIATAVKFLQNSRVRQSPLATRRAFLKKKGLTDEEIDMAFQQSGTAADEPSSLGPATQVVPVQPPHLISQPYSPAGSRWRDYGALAIIMAGIAFGFHQLYKKYLLPLILGGREDRKQLERMEAGLSELSGSVAQTVTQLQTTLASVQELLIQQQQKIQELAHELAAAKATTSTNWILESQNINELKSEINSLKGLLLNRRQFPPSPSAPKIPSWQIPVKSPSPSSPAAVNHHSSSDISPVSNESTSSSPGKEGHSPEGSTVTYHLLGPQEEGEGVVDVKGQVRMEVQGEEEKREDKEDEEDEEDDDVSHVDEEDCLGVQREDRRGGDGQINEQVEKLRRPEGASNESERD

SEQ ID NO: 4605 - protein, 985 aa, Homo sapiens
MAASVAAAARRLRRAIRRSPAWRGLSHRPLSSEPPAAKASAVRAAFLNFFRDRHGHRLVPSASVRPRGDPSLLFVNAGMNQFKPIFLGTVDPRSEMAGFRRVANSQKCVRAGGHHNDLEDVGRDLSHHTFFEMLGNWAFGGEYFKEEACNMAWELLTQVYGIPEERLWISYFDGDPKAGLDPDLETRDIWLSLGVPASRVLSFGPQENFWEMGDTGPCGPCTEIHYDLAGGVGAPQLVELWNLVFMQHNREADGSLQPLPQRHVDTGMGLERLVAVLQGKHSTYDTDLFSPLLNAIQQGCRAPPYLGRVGVADEGRTDTAYRVVADHIRTLSVCISDGVFPGMSGPPLVLRRILRRAVRFSMEILKAPPGFLGSLVPVVVETLGDAYPELQRNSAQIANLVSEDEAAFLASLERGRRIIDRTLRTLGPSDMFPAEVAWSLSLCGDLGLPLDMVELMLEEKGVQLDSAGLERLAQEEAQHRARQAEPVQKQGLWLDVHALGELQRQGVPPTDDSPKYNYSLRPSGSYEFGTCEAQVLQLYTEDGTAVASVGKGQRCGLLLDRTNFYAEQGGQASDRGYLVRAGQEDVLFPVARAQVCGGFILHEAVAPECLRLGDQVQLHVDEAWRLGCMAKHTATHLLNWALRQTLGPGTEQQGSHLNPEQLRLDVTTQTPLTPEQLRAVENTVQEAVGQDEAVYMEEVPLALTAQVPGLRSLDEVYPDPVRVVSVGVPVAHALDPASQAALQTSVELCCGTHLLRTGAVGDLVIIGDRQLSKGTTRLLAVTGEQAQQARELGQSLAQEVKAATERLSLGSRDVAEALRLSKDIGRLIEAVETAVMPQWQRRELLATVKMLQRRANTAIRKLQMGQAAKKTQELLERHSKGPLIVDTVSAESLSVLVKVVRQLCEQAPSTSVLLLSPQPMGKVLCACQVAQGAMPTFTAEAWALAVCSHMGGKAWGSRVVAQGTGSTTDLEAALSIAQTYALSQL

SEQ ID NO: 4606 - protein, 321 aa, Homo sapiens
MEEGQYSEIEELPRRRCCRRGTQIVLLGLVTAALWAGLLTLLLLWHWDTTQSLKQLEERAARNVSQVSKNLESHHGDQMAQKSQSTQISQELEELRAEQQRLKSQDLELSWNLNGLQADLSSFKSQELNERNEASDLLERLREEVTKLRMELQVSSGFVCNTCPEKWINFQRKCYYFGKGTKQWVHARYACDDMEGQLVSIHSPEEQDFLTKHASHTGSWIGLRNLDLKGEFIWVDGSHVDYSNWAPGEPTSRSQGEDCVMMRGSGRWNDAFCDRKLGAWVCDRLATCTPPASEGSAESMGPDSRPDPDGRLPTPSAPLHS

SEQ ID NO: 4607 - protein, 215 aa, Homo sapiens
MPGEATETVPATEQELPQPQAETGSGTESDSDESVPELEEQDSTQATTQQAQLAAAAEIDEEPVSKAKQSRSEKKARKAMSKLGLRQVTGVTRVTIRKSKNILFVITKPDVYKSPASDTYIVFGEAKIEDLSQQAQLAAAEKFKVQGEAVSNIQENTQTPTVQEESEEEEVDETGVEVKDIELVMSQANVSRAKAVRALKNNSNDIVNAIMELTM

SEQ ID NO: 4608 - protein, 724 aa, Homo sapiens
MSSARTPLPTLNERDTEQPTLGHLDSKPSSKSNMIRGRNSATSADEQPHIGNYRLLKTIGKGNFAKVKLARHILTGKEVAVKIIDKTQLNSSSLQKLFREVRIMKVLNHPNIVKLFEVIETEKTLYLVMEYASGGEVFDYLVAHGRMKEKEARAKFRQIVSAVQYCHQKFIVHRDLKAENLLLDADMNIKIADFGFSNEFTFGNKLDTFCGSPPYAAPELFQGKKYDGPEVDVWSLGVILYTLVSGSLPFDGQNLKELRERVLRGKYRIPFYMSTDCENLLKKFLILNPSKRGTLEQIMKDRWMNVGHEDDELKPYVEPLPDYKDPRRTELMVSMGYTREEIQDSLVGQRYNEVMATYLLLGYKSSELEGDTITLKPRPSADLTNSSAPSPSHKVQRSVSANPKQRRFSDQAGPAIPTSNSYSKKTQSNNAENKRPEEDRESGRKASSTAKVPASPLPGLERKKTTPTPSTNSVLSTSTNRSRNSPLLERASLGQASIQNGKDSTAPQRVPVASPSAHNISSSGGAPDRTNFPRGVSSRSTFHAGQLRQVRDQQNLPYGVTPASPSGHSQGRRGASGSIFSKFTSKFVRRNLNEPESKDRVETLRPHVVGSGGNDKEKEEFREAKPRSLRFTWSMKTTSSMEPNEMMREIRKVLDANSCQSELHEKYMLLCMHGTPGHEDFVQWEMEVCKLPRLSLNGVRFKRISGTSMAFKNIASKIANELKL

SEQ ID NO: 4609 - protein, 755 aa, Homo sapiens
MIRGRNSATSADEQPHIGNYRLLKTIGKGNFAKVKLARHILTGKEVAVKIIDKTQLNSSSLQKLFREVRIMKVLNHPNIVKLFEVIETEKTLYLVMEYASGGEVFDYLVAHGRMKEKEARAKFRQIVSAVQYCHQKFIVHRDLKAENLLLDADMNIKIADFGFSNEFTFGNKLDTFCGSPPYAAPELFQGKKYDGPEVDVWSLGVILYTLVSGSLPFDGQNLKELRERVLRGKYRIPFYMSTDCENLLKKFLILNPSKRGTLEQIMKDRWMNVGHEDDELKPYVEPLPDYKDPRRTELMVSMGYTREEIQDSLVGQRYNEVMATYLLLGYKSSELEGDTITLKPRPSADLTNSSAPSPSHKVQRSVSANPKQRRFSDQAAGPAIPTSNSYSKKTQSNNAENKRPEEDRESGRKASSTAKVPASPLPGLERKKTTPTPSTNSVLSTSTNRSRNSPLLERASLGQASIQNGKDSLTMPGSRASTASASAAVSAARPRQHQKSMSASVHPNKASGLPPTESNCEVPRPSTAPQRVPVASPSAHNISSSGGAPDRTNFPRGVSSRSTFHAGQLRQVRDQQNLPYGVTPASPSGHSQGRRGASGSIFSKFTSKFVRRNLSFRFARRNLNEPESKDRVETLRPHVVGSGGNDKEKEEFREAKPRSLRFTWSMKTTSSMEPNEMMREIRKVLDANSCQSELHEKYMLLCMHGTPGHEDFVQWEMEVCKLPRLSLNGVRFKRISGTSMAFKNIASKIANELKL

SEQ ID NO: 4610 - protein, 691 aa, Homo sapiens
MIRGRNSATSADEQPHIGNYRLLKTIGKGNFAKVKLARHILTGKEVAVKIIDKTQLNSSSLQKLFREVRIMKVLNHPNIVKLFEVIETEKTLYLVMEYASGGEVFDYLVAHGRMKEKEARAKFRQIVSAVQYCHQKFIVHRDLKAENLLLDADMNIKIADFGFSNEFTFGNKLDTFCGSPPYAAPELFQGKKYDGPEVDVWSLGVILYTLVSGSLPFDGQNLKELRERVLRGKYRIPFYMSTDCENLLKKFLILNPSKRGTLEQIMKDRWMNVGHEDDELKPYVEPLPDYKDPRRTELMVSMGYTREEIQDSLVGQRYNEVMATYLLLGYKSSELEGDTITLKPRPSADLTNSSAPSPSHKVQRSVSANPKQRRFSDQAGPAIPTSNSYSKKTQSNNAENKRPEEDRESGRKASSTAKVPASPLPGLERKKTTPTPSTNSVLSTSTNRSRNSPLLERASLGQASIQNGKDSTAPQRVPVASPSAHNISSSGGAPDRTNFPRGVSSRSTFHAGQLRQVRDQQNLPYGVTPASPSGHSQGRRGASGSIFSKFTSKFVRRNLNEPESKDRVETLRPHVVGSGGNDKEKEEFREAKPRSLRFTWSMKTTSSMEPNEMMREIRKVLDANSCQSELHEKYMLLCMHGTPGHEDFVQWEMEVCKLPRLSLNGVRFKRISGTSMAFKNIASKIANELKL

SEQ ID NO: 4611 - protein, 745 aa, Homo sapiens
MIRGRNSATSADEQPHIGNYRLLKTIGKGNFAKVKLARHILTGKEVAVKIIDKTQLNSSSLQKLFREVRIMKVLNHPNIVKLFEVIETEKTLYLVMEYASGGEVFDYLVAHGRMKEKEARAKFRQIVSAVQYCHQKFIVHRDLKAENLLLDADMNIKIADFGFSNEFTFGNKLDTFCGSPPYAAPELFQGKKYDGPEVDVWSLGVILYTLVSGSLPFDGQNLKELRERVLRGKYRIPFYMSTDCENLLKKFLILNPSKRGTLEQIMKDRWMNVGHEDDELKPYVEPLPDYKDPRRTELMVSMGYTREEIQDSLVGQRYNEVMATYLLLGYKSSELEGDTITLKPRPSADLTNSSAPSPSHKVQRSVSANPKQRRFSDQAGPAIPTSNSYSKKTQSNNAENKRPEEDRESGRKASSTAKVPASPLPGLERKKTTPTPSTNSVLSTSTNRSRNSPLLERASLGQASIQNGKDSLTMPGSRASTASASAAVSAARPRQHQKSMSASVHPNKASGLPPTESNCEVPRPSTAPQRVPVASPSAHNISSSGGAPDRTNFPRGVSSRSTFHAGQLRQVRDQQNLPYGVTPASPSGHSQGRRGASGSIFSKFTSKFVRRNLNEPESKDRVETLRPHVVGSGGNDKEKEEFREAKPRSLRFTWSMKTTSSMEPNEMMREIRKVLDANSCQSELHEKYMLLCMHGTPGHEDFVQWEMEVCKLPRLSLNGVRFKRISGTSMAFKNIASKIANELKL

SEQ ID NO: 4612 - protein, 231 aa, Homo sapiens
MQDEERYMTLNVQSKKRSSAQTSQLTFKDYSVTLHWYKILLGISGTVNGILTLTLISLILLVSQGVLLKCQKGSCSNATQYEDTGDLKVNNGTRRNISNKDLCASRSADQTVLCQSEWLKYQGKCYWFSNEMKSWSDSYVYCLERKSHLLIIHDQLEMAFIQKNLRQLNYVWIGLNFTSLKMTWTWVDGSPIDSKIFFIKGPAKENSCAAIKESKIFSETCSSVFKWICQY

SEQ ID NO: 4613 - protein, 309 aa, Homo sapiens
MVGFKATDVPPTATVKFLGAGTAACIADLITFPLDTAKVRLQIQGESQGPVRATASAQYRGVMGTILTMVRTEGPRSLYNGLVAGLQRQMSFASVRIGLYDSVKQFYTKGSEHASIGSRLLAGSTTGALAVAVAQPTDVVKVRFQAQARAGGGRRYQSTVNAYKTIAREEGFRGLWKGTSPNVARNAIVNCAELVTYDLIKDALLKANLMTDDLPCHFTSAFGAGFCTTVIASPVDVVKTRYMNSALGQYSSAGHCALTMLQKEGPRAFYKGFMPSFLRLGSWNVVMFVTYEQLKRALMAACTSREAPF

SEQ ID NO: 4614 - protein, 331 aa, Homo sapiens
MGSAGLSRLHGLFAVYKPPGLKWKHLRDTVELQLLKGLNARKPPAPKQRVRFLLGPMEGSEEKELTLTATSVPSFINHPLVCGPAFAHLKVGVGHRLDAQASGVLVLGVGHGCRLLTDMYNAHLTKDYTVRGLLGKATDDFREDGRLVEKTTYDHVTREKLDRILAVIQGSHQKALVMYSNLDLKTQEAYEMAVRGLIRPMNKSPMLITGIRCLYFAPPEFLLEVQCMHETQKELRKLVHEIGLELKTTAVCTQVRRTRDGFFTLDSALLRTQWDLTNIQDAIRAATPQVAAELEKSLSPGLDTKQLPSPGWSWDSQGPSSTLGLERGAGQ

SEQ ID NO: 4615 - protein, 379 aa, Homo sapiens
MSRSGTDPQQRQQASEADAAAATFRANDHQHIRYNPLQDEWVLVSAHRMKRPWQGQVEPQLLKTVPRHDPLNPLCPGAIRANGEVNPQYDSTFLFDNDFPALQPDAPSPGPSDHPLFQAKSARGVCKVMCFHPWSDVTLPLMSVPEIRAVVDAWASVTEELGAQYPWVQIFENKGAMMGCSNPHPHCQVWASSFLPDIAQREERSQQAYKSQHGEPLLMEYSRQELLRKERLVLTSEHWLVLVPFWATWPYQTLLLPRRHVRRLPELTPAERDDLASIMKKLLTKYDNLFETSFPYSMGWHGAPTGSEAGANWNHWQLHAHYYPPLLRSATVRKFMVGYEMLAQAQRDLTPEQAAERLRALPEVHYHLGQKDRETATIA

SEQ ID NO: 4616 - protein, 381 aa, Homo sapiens
MASPSLERPEKGAGKSEFRNQKPKPENQDESELLTVPDGWKEPAFSKEDNPRGLLEESSFATLFPKYREAYLKECWPLVQKALNEHHVNATLDLIEGSMTVCTTKKTFDPYIIIRARDLIKLLARSVSFEQAVRILQDDVACDIIKIGSLVRNKERFVKRRQRLIGPKGSTLKALELLTNCYIMVQGNTVSAIGPFSGLKEVRKVVLDTMKNIHPIYNIKSLMIKRELAKDSELRSQSWERFLPQFKHKNVNKRKEPKKKTVKKEYTPFPPPQPGSQIDKELASGEYFLKANQKKRQKMEAIKAKQAEAISKRQEERNKAFIPPKEKPIVKPKEASTEAKIDVASIKEKVKKAKNKKLGALTAEEIALKMEADEKKKKKKK

SEQ ID NO: 4617 - protein, 218 aa, Homo sapiens
MASRGGGRGRGRGQLTFNVEAVGIGKGDALPPPTLQPSPLFPPLEFRPVPLPSGEEGEYVLALKQELRGAMRQLPYFIRPAVPKRDVERYSDKYQMSGPIDNAIDWNPDWRRLPRELKIRVRKLQKERITILLPKRPPKTTEDKEETIQKLETLEKKEEEVTSEEDEEKEEEEEKEEEEEEEYDEEEHEEETDYIMSYFDNGEDFGGDSDDNMDEAIY

SEQ ID NO: 4618 - protein, 341 aa, Homo sapiens
MGNTTSCCVSSSPKLRRNAHSRLESYRPDTDLSREDTGCNLQHISDRENIDDLNMEFNPSDHPRASTIFLSKSQTDVREKRKSLFINHHPPGQIARKYSSCSTIFLDDSTVSQPNLKYTIKCVALAIYYHIKNRDPDGRMLLDIFDENLHPLSKSEVPPDYDKHNPEQKQIYRFVRTLFSAAQLTAECAIVTLVYLERLLTYAEIDICPANWKRIVLGAILLASKVWDDQAVWNVDYCQILKDITVEDMNELERQFLELLQFNINVPSSVYAKYYFDLRSLAEANNLSFPLEPLSRERAHKLEAISRLCEDKYKDLRRSARKRSASADNLTLPRWSPAIIS

SEQ ID NO: 4619 - protein, 287 aa, Homo sapiens
MEFNPSDHPRASTIFLSKSQTDVREKRKSLFINHHPPGQIARKYSSCSTIFLDDSTVSQPNLKYTIKCVALAIYYHIKNRDPDGRMLLDIFDENLHPLSKSEVPPDYDKHNPEQKQIYRFVRTLFSAAQLTAECAVVTLVYLERLLTYAEIDICPANWKRIVLGAILLASKVWDDQAVWNVDYCQILKDITVEDMSELERQFLELLQFNINVPSSVYAKYYFDLRSLAEANNLSFPLEPLSRERAHKLEAISRLCEDKYKDLRRSARKRSASADNLTLPRWSPAIIS

SEQ ID NO: 4620 - protein, 475 aa, Homo sapiens
MADMQNLVERLERAVGRLEAVSHTSDMHRGYADSPSKAGAAPYVQAFDSLLAGPVAEYLKISKEIGGDVQKHAEMVHTGLKLERALLVTASQCQQPAENKLSDLLAPISEQIKEVITFREKNRGSKLFNHLSAVSESIQALGWVAMAPKPGPYVKEMNDAAMFYTNRVLKEYKDVDKKHVDWVKAYLSIWTELQAYIKEFHTTGLAWSKTGPVAKELSGLPSGPSAGSGPPPPPPGPPPPPVSTSSGSDESASRSALFAQINQGESITHALKHVSDDMKTHKNPALKAQSGPVRSGPKPFSAPKPQTSPSPKRATKKEPAVLELEGKKWRVENQENVSNLVIEDTELKQVAYIYKCVNTTLQIKGKINSITVDNCKKLGLVFDDVVGIVEIINSKDVKVQVMGKVPTISINKTDGCHAYLSKNSLDCEIVSAKSSEMNVLIPTEGGDFNEFPVPEQFKTLWNGQKLVTTVTEIAG

SEQ ID NO: 4621 - protein, 1119 aa, Homo sapiens
MTAAAASNWGLITNIVNSIVGVSVLTMPFCFKQCGIVLGALLLVFCSWMTHQSCMFLVKSASLSKRRTYAGLAFHAYGKAGKMLVETSMIGLMLGTCIAFYVVIGDLGSNFFARLFGFQVGGTFRMFLLFAVSLCIVLPLSLQRNMMASIQSFSAMALLFYTVFMFVIVLSSLKHGLFSGQWLRRVSYVRWEGVFRCIPIFGMSFACQSQVLPTYDSLDEPSVKTMSSIFASSLNVVTTFYVMVGFFGYVSFTEATAGNVLMHFPSNLVTEMLRVGFMMSVAVGFPMMILPCRQALSTLLCEQQQKDGTFAAGGYMPPLRFKALTLSVVFGTMVGGILIPNVETILGLTGATMGSLICFICPALIYKKIHKNALSSQVVLWVGLGVLVVSTVTTLSVSEEVPEDLAEEAPGGRLGEAEGLMKVEAARLSAQDPVVAVAEDGREKPKLPKEREELEQAQIKGPVDVPGREDGKEAPEEAQLDRPGQGIAVPVGEAHRHEPPVPHDKVVVDEGQDREVPEENKPPSRHAGGKAPGVQGQMAPPLPDSEREKQEPEQGEVGKRPGQAQALEEAGDLPEDPQKVPEADGQPAVQPAKEDLGPGDRGLHPRPQAVLSEQQNGLAVGGGEKAKGGPPPGNAAGDTGQPAEDSDHGGKPPLPAEKPAPGPGLPPEPREQRDVERAGGNQAASQLEEAGRAEMLDHAVLLQVIKEQQVQQKRLLDQQEKLLAVIEEQHKEIHQQRQEDEEDKPRQVEVHQEPGAAVPRGQEAPEGKARETVENLPPLPLDPVLRAPGGRPAPSQDLNQRSLEHSEGPVGRDPAGPPDGGPDTEPRAAQAKLRDGQKDAAPRAAGTVKELPKGPEQVPVPDPAREAGGPEERLAEEFPGQSQDVTGGSQDRKKPGKEVAATGTSILKEANWLVAGPGAETGDPRMKPKQVSRDLGLAADLPGGAEGAAAQPQAVLRQPELRVISDGEQGGQQGHRLDHGGHLEMRKARGGDHVPVSHEQPRGGEDAAVQEPRQRPEPELGLKRAVPGGQRPDNAKPNRDLKLQAGSDLRRRRRDLGPHAEGQLAPRDGVIIGLNPLPDVQVNDLRGALDAQLRQAAGGALQVVHSRQLRQAPGPPEES

SEQ ID NO: 4622 - protein, 780 aa, Homo sapiens
MTAAAASNWGLITNIVNSIVGVSVLTMPFCFKQCGIVLGALLLVFCSWMTHQSCMFLVKSASLSKRRTYAGLAFHAYGKAGKMLVETSMIGLMLGTCIAFYVVIGDLGSNFFARLFGFQVGGTFRMFLLFAVSLCIVLPLSLQRNMMASIQSFSAMALLFYTVFMFVIVLSSLKHGLFSGQWLRRVSYVRWEGVFRCIPIFGMSFACQSQVLPTYDSLDEPSVKTMSSIFASSLNVVTTFYVMVGFFGYVSFTEATAGNVLMHFPSNLVTEMLRVGFMMSVAVGFPMMILPCRQALSTLLCEQQQKDGTFAAGGYMPPLRFKALTLSVVFGTMVGGILIPNVETILGLTGATMGSLICFICPALIYKKIHKNALSSQVVLWVGLGVLVVSTVTTLSVSEEVPEDLAEEAPGGRLGEAEGLMKVEAARLSAQDPVVAVAEDGREKPKLPKEREELEQAQIKGPVDVPGREDGKEAPEEAQLDRPGQGIAVPVGEAHRHEPPVPHDKVVVDEGQDREVPEENKPPSRHAGGKAPGVQGQMAPPLPDSEREKQEPEQGEVGKRPGQAQALEEAGDLPEDPQKVPEADGQPAVQPAKEDLGPGDRGLHPRPQAVLSEQQNGLAVGGGEKAKGGPPPGNAAGDTGQPAEDSDHGGKPPLPAEKPAPGPGLPPEPREQRDVERAGGNQAASQLEGKASALQPPASGPGSGSPLPQPWGDAQVILGSPARPPFSFQPPAEQTPRRAFCSLPISSLLSGNLLSALLPFKHLRHRHMACDYRFISLAPL

SEQ ID NO: 4623 - protein, 445 aa, Homo sapiens
MGGVGEPGPREGPAQPGAPLPTFCWEQIRAHDQPGDKWLVIERRVYDISRWAQRHPGGSRLIGHHGAEDATDAFRAFHQDLNFVRKFLQPLLIGELAPEEPSQDGPLNAQLVEDFRALHQAAEDMKLFDASPTFFAFLLGHILAMEVLAWLLIYLLGPGWVPSALAAFILAISQAQSWCLQHDLGHASIFKKSWWNHVAQKFVMGQLKGFSAHWWNFRHFQHHAKPNIFHKDPDVTVAPVFLLGESSVEYGKKKRRYLPYNQQHLYFFLIGPPLLTLVNFEVENLAYMLVCMQWADLLWAASFYARFFLSYLPFYGVPGVLLFFVAVRVLESHWFVWITQMNHIPKEIGHEKHRDWVSSQLAATCNVEPSLFTNWFSGHLNFQIEHHLFPRMPRHNYSRVAPLVKSLCAKHGLSYEVKPFLTALVDIVRSLKKSGDIWLDAYLHQ

SEQ ID NO: 4624 - protein, 414 aa, Homo sapiens
MVQKKPAELQGFHRSFKGQNPFELAFSLDQPDHGDSDFGLQCSARPDMPASQPIDIPDAKKRGKKKKRGRATDSFSGRFEDVYQLQEDVLGEGAHARVQTCINLITSQEYAVKIIEKQPGHIRSRVFREVEMLYQCQGHRNVLELIEFFEEEDRFYLVFEKMRGGSILSHIHKRRHFNELEASVVVQDVASALDFLHNKGIAHRDLKPENILCEHPNQVSPVKICDFDLGSGIKLNGDCSPISTPELLTPCGSAEYMAPEVVEAFSEEASIYDKRCDLWSLGVILYILLSGYPPFVGRCGSDCGWDRGEACPACQNMLFESIQEGKYEFPDKDWAHISCAAKDLISKLLVRDAKQRLSAAQVLQHPWVQGCAPENTLPTPMVLQRWDSHFLLPPHPCRIHVRPGGLVRTVTVNE

SEQ ID NO: 4625 - protein, 465 aa, Homo sapiens
MVQKKPAELQGFHRSFKGQNPFELAFSLDQPDHGDSDFGLQCSARPDMPASQPIDIPDAKKRGKKKKRGRATDSFSGRFEDVYQLQEDVLGEGAHARVQTCINLITSQEYAVKIIEKQPGHIRSRVFREVEMLYQCQGHRNVLELIEFFEEEDRFYLVFEKMRGGSILSHIHKRRHFNELEASVVVQDVASALDFLHNKGIAHRDLKPENILCEHPNQVSPVKICDFDLGSGIKLNGDCSPISTPELLTPCGSAEYMAPEVVEAFSEEASIYDKRCDLWSLGVILYILLSGYPPFVGRCGSDCGWDRGEACPACQNMLFESIQEGKYEFPDKDWAHISCAAKDLISKLLVRDAKQRLSAAQVLQHPWVQGCAPENTLPTPMVLQRNSCAKDLTSFAAEAIAMNRQLAQHDEDLAEEEAAGQGQPVLVRATSRCLQLSPPSQSKLAQRRQRASLSSAPVVLVGDHA

SEQ ID NO: 4626 - protein, 989 aa, Homo sapiens
MKVVNLKQAILQAWKERWSDYQWAINMKKFFPKGATWDILNLADALLEQAMIGPSPNPLILSYLKYAISSQMVSYSSVLTAISKFDDFSRDLCVQALLDIMDMFCDRLSCHGKAEECIGLCRALLSALHWLLRCTAASAERLREGLEAGTPAAGEKQLAMCLQRLEKTLSSTKNRALLHIAKLEEASSWTAIEHSLLKLGEILANLSNPQLRSQAEQCGTLIRSIPTMLSVHAEQMHKTGFPTVHAVILLEGTMNLTGETQSLVEQLTMVKRMQHIPTPLFVLEIWKACFVGLIESPEGTEELKWTAFTFLKIPQVLVKLKKYSHGDKDFTEDVNCAFEFLLKLTPLLDKADQRCNCDCTNFLLQECGKQGLLSEASVNNLMAKRKADREHAPQQKSGENANIQPNIQLILRAEPTVTNILKTMDADHSKSPEGLLGVLGHMLSGKSLDLLLAAAAATGKLKSFARKFINLNEFTTYGSEESTKPASVRALLFDISFLMLCHVAQTYGSEVILSESRTGAEVPFFETWMQTCMPEEGKILNPDHPCFRPDSTKVESLVALLNNSSEMKLVQMKWHEACLSISAAILEILNAWENGVLAFESIQKITDNIKGKVCSLAVCAVAWLVAHVRMLGLDEREKSLQMIRQLAGPLFSENTLQFYNERVVIMNSILERMCADVLQQTATQIKFPSTGVDTMPYWNLLPPKRPIKEVLTDIFAKVLEKGWVDSRSIHIFDTLLHMGGVYWFCNNLIKELLKETRKEHTLRAVELLYSIFCLDMQQVTLVLLGHILPGLLTDSSKWHSLMDPPGTALAKLAVWCALSSYSSHKGQASTRQKKRHREDIEDYISLFPLDDVQPSKLMRLLSSNEDDANILSSPTDRSMSSSLSASQLHTVNMRDPLNRVLANLFLLISSILGSRTAGPHTQFVQWFMEECVDCLEQGGRGSVLQFMPFTTVSELVKVSAMSSPKVVLAITDLSLPLGRQVAAKAIAAL

SEQ ID NO: 4627 - protein, 486 aa, Homo sapiens
MAAVKTLNPKAEVARAQAALAVNISAARGLQDVLRTNLGPKGTMKMLVSGAGDIKLTKDGNVLLHEMGLHPRIITEGFEAAKEKALQFLEEVKVSREMDRETLIDVARTSLRTKVHAELADVLTEAVVDSILAIKKQDEPIDLFMIEIMEMKHKSETDTSLIRGLVLDHGARHPDMKKRVEDAYILTCNVSLEYEKTEVNSGFFYKSAEEREKLVKAERKFIEDRVKKIIELKRKVCGDSDKGFVVINQKGIDPFSLDALSKEGIVALRRAKRRNMERLTLACGGVALNSFDDLSPDCLGHAGLVYEYTLGEEKFTFIEKCNNPRSVTLLIKGPNKHTLTQIKDAVRDGLRAVKNAIDDGCVVPGAGAVEVAMAEALIKHKPSVKGRAQLGVQAFADALLIIPKVLAQNSGFDLQETLVKIQAEHSESGQLVGVDLNTGEPMVAAEVGVWDNYCVKKQLLHSCTVIATNILLVDEIMRAGMSSLKG

SEQ ID NO: 4628 - protein, 531 aa, Homo sapiens
MAAVKTLNPKAEVARAQAALAVNISAARGLQDVLRTNLGPKGTMKMLVSGAGDIKLTKDGNVLLHEMQIQHPTASLIAKVATAQDDITGDGTTSNVLIIGELLKQADLYISEGLHPRIITEGFEAAKEKALQFLEEVKVSREMDRETLIDVARTSLRTKVHAELADVLTEAVVDSILAIKKQDEPIDLFMIEIMEMKHKSETDTSLIRGLVLDHGARHPDMKKRVEDAYILTCNVSLEYEKTEVNSGFFYKSAEEREKLVKAERKFIEDRVKKIIELKRKVCGDSDKGFVVINQKGIDPFSLDALSKEGIVALRRAKRRNMERLTLACGGVALNSFDDLSPDCLGHAGLVYEYTLGEEKFTFIEKCNNPRSVTLLIKGPNKHTLTQIKDAVRDGLRAVKNAIDDGCVVPGAGAVEVAMAEALIKHKPSVKGRAQLGVQAFADALLIIPKVLAQNSGFDLQETLVKIQAEHSESGQLVGVDLNTGEPMVAAEVGVWDNYCVKKQLLHSCTVIATNILLVDEIMRAGMSSLKG

SEQ ID NO: 4629 - protein, 82 aa, Homo sapiens
MGREFGNLTRMRHVISYSLSPFEQRAYPHVFTKGIPNVLRRIRESFFRVVPQFVVFYLIYTWGTEEFERSKRKNPAAYENDK

SEQ ID NO: 4630 - protein, 1324 aa, Homo sapiens
MHVFVQSTCGEETMDSLDHMLTDPLELGPCGDGHGTRIMEDCLLGGTRVSLPEDLLEDPEIFFDVVSLSTWQEVLSDSQREHLQQFLPQFPEDSAEQQNELILALFSGENFRFGNPLHIAQKLFRDGHFNPEVVKYRQLCFKSQYKRYLNSQQQYFHRLLKQILASRSDLLEMARRSGPALPFRQKRPSPSRTPEEREWRTQQRYLKVLREVKEECGDTALSSDEEATLDLQEQFSFEDLSSWLPSSPARSPSPAVPLRVVPTLSTTDMKTADKVELGDSDLKIMLKKHHEKRKHQPDHPDLLTGDLTLNDIMTRVNAGRKGSLAALYDLAVLKKKVKEKEEKKKKKIKTIKSEAEDLAEPLSSTEGVAPLSQAPSPLAIPAIKEEPLEDLKPCLGINEISSSFFSLLLEILLLESQASLPMLEERVLDWQSSPASSLNSWFSAAPNWAELVLPALQYLAGESRAVPSSFSPFVEFKEKTQQWKLLGQSQDNEKELAALFQLWLETKDQAFCKQENEDSSDATTPVPRVRTDYVVRPSTGEEKRVFQEQERYRYSQPHKAFTFRMHGFESVVGPVKGVFDKETSLNKAREHSLLRSDRPAYVTILSLVRDAAARLPNGEGTRAEICELLKDSQFLAPDVTSTQVNTVVSGALDRLHYEKDPCVKYDIGRKLWIYLHRDRSEEEFERIHQAQAAAAKARKALQQKPKPPSKVKSSSKESSIKVLSSGPSEQSQMSLSDSSMPPTPVTPVTPTTPALPAIPISPPPVSAVNKSGPSTVSEPAKSSSGVLLVSSPTMPHLGTMLSPASSQTAPSSQAAARVVSHSGSAGLSQVRVVAQPSLPAVPQQSGGPAQTLPQMPAGPQIRVPATATQTKVVPQTVMATVPVKAQTTAATVQRPGPGQTGLTVTSLPATASPVSKPATSSPGTSAPSASTAAVIQNVTGQNIIKQVAITGQLGVKPQTGNSIPLTATNFRIQGKDVLRLPPSSITTDAKGQTVLRITPDMMATLAKSQVTTVKLTQDLFGTGGNTTGKGISATLHVTSNPVHAADSPAKASSASAPSSTPTGTTVVKVTPDLKPTEASSSAFRLMPALGVSVADQKGKSTVASSEAKPAATIRIVQGLGVMPPKAGQTITVATHAKQGASVASGSGTVHTSAVSLPSMNAAVSKTVAVASGAASTPISISTGAPTVRQVPVSTTVVSTSQAGKLPTRITVPLSVISQPMKGKSVVTAPIIKGNLGANLSGLGRNIILTTMPAGTKLIAGNKPVSFLTAQQLQQLQQQGQATQVRIQTVPASHLQQGTASGSSKAVSTVVVTTAPSPKQAPEQQ

SEQ ID NO: 4631 - protein, 181 aa, Homo sapiens
MLLEPGRGCCALAILLAIVDIQSGGCINITSSASQEGTRLNLICTVWHKKEEAEGFVVFLCKDRSGDCSPETSLKQLRLKRDPGIDGVGEISSQLMFTISQVTPLHSGTYQCCARSQKSGIRLQGHFFSILFTETGNYTVTGLKQRQHLEFSHNEGTLSSGFLQEKVWVMLVTSLVALQAL

SEQ ID NO: 4632 - protein, 547 aa, Homo sapiens
MAEPSGSPVHVQLPQQAAPVTAAAAAAPAAATAAPAPAAPAAPAPAPAPAPAAQAVGWPICRDAYELQEVIGSGATAVVQAALCKPRQERVAIKRINLEKCQTSMDELLKEIQAMSQCSHPNVVTYYTSFVVKDELWLVMKLLSGGSMLDIIKYIVNRGEHKNGVLEEAIIATILKEVLEGLDYLHRNGQIHRDLKAGNILLGEDGSVQIADFGVSAFLATGGDVTRNKVRKTFVGTPCWMAPEVMEQVRGYDFKADMWSFGITAIELATGAAPYHKYPPMKVLMLTLQNDPPTLETGVEDKEMMKKYGKSFRKLLSLCLQKDPSKRPTAAELLKCKFFQKAKNREYLIEKLLTRTPDIAQRAKKVRRVPGSSGHLHKTEDGDWEWSDDEMDEKSEEGKAAFSQEKSRRVKEENPEIAVSASTIPEQIQSLSVHDSQGPPNANEDYREASSCAVNLVLRLRNSRKELNDIRFEFTPGRDTADGVSQELFSAGLVDGHDVVIVAANLQKIVDDPKALKTLTFKLASGCDGSEIPDEVKLIGFAQLSVS

SEQ ID NO: 4633 - protein, 698 aa, Homo sapiens
MAAAGAAVARSPGIGAGPALRARRSPPPRAARLPRLLVLLAAAAVGPGAGGAARLYRAGEDAVWVLDSGSVRGATANSSAAWLVQFYSSWCGHCIAYAPTWRALAGDVRDWASAIRVAALDCMEEKNQAVCHDYDIHFYPTFRYFKAFTKEFTTGENFKGPDRELRTVRQTMIDFLQNHTEGSRPPACPRLDPIQPSDVLSLLDNRGSHYVAIVFESNSSYLGREVILDLIPYESIVVTRALDGDKAFLEKLGVSSVPSCYLIYPNGSHGLINVVKPLRAFFSSYLKSLPDVRKKSLPLPEKPHKEENSEIVVWREFDKSKLYTVDLESGLHYLLRVELAAHKSLAGAELKTLKDFVTVLAKLFPGRPPVKKLLEMLQEWLASLPLDRIPYNAVLDLVNNKMRISGIFLTNHIKWVGCQGSRSELRGYPCSLWKLFHTLTVEASTHPDALVGTGFEDDPQAVLQTMRRYVHTFFGCKECGEHFEEMAKESMDSVKTPDQAILWLWKKHNMVNGRLAGHLSEDPRFPKLQWPTPDLCPACHEEIKGLASWDEGHVLTFLKQHYGRDNLLDTYSADQGDSSEGGTLARGEEEEKRLTPPEVSHGDRDTQSVRPPGALGPRPALPESLHHSLDGKLQSLDGPGAHKEVGGAAPFLGVDFSSLDMSLCVVLYVASSLFLMVMYFFFRVRSRRWKVKHHHPAV

SEQ ID NO: 4634 - protein, 133 aa, Homo sapiens
MLSPEAERVLRYLVEVEELAEEVLADKRQIVDLDTKRNQNREGLRALQKDLSLSEDVMVCFGNMFIKMPHPETKEMIEKDQDHLDKEIEKLRKQLKVKVNRLFEAQGKPELKGFNLNPLNQDELKALKVILKG

SEQ ID NO: 4635 - protein, 110 aa, Homo sapiens
MSHHPHSLRNSCLIRMDLLYWQFTIYTITFCFSHLSGRLTLSAQHISHRPCLLSYSLLFWKVHHLFLEGFPCSPRLDEMSFHQFPQHPVHVSVVHLPIVYKGSMTQVSPH

SEQ ID NO: 4636 - protein, 535 aa, Homo sapiens
MAAVATCGSVAASTGSAVATASKSNVTSFQRRGPRASVTNDSGPRLVSIAGTRPSVRNGQLLVSTGLPALDQLLGGGLAVGTVLLIEEDKYNIYSPLLFKYFLAEGIVNGHTLLVASAKEDPANILQELPAPLLDDKCKKEFDEDVYNHKTPESNIKMKIAWRYQLLPKMEIGPVSSSRFGHYYDASKRMPQELIEASNWHGFFLPEKISSTLKVEPCSLTPGYTKLLQFIQNIIYEEGFDGSNPQKKQRNILRIGIQNLGSPLWGDDICCAENGGNSHSLTKFLYVLRGLLRTSLSACIITMPTHLIQNKAIIARVTTLSDVVVGLESFIGSERETNPLYKDYHGLIHIRQIPRLNNLICDESDVKDLAFKLKRKLFTIEAGVQWHDLGSRRPRLLGSGGSPASASLVAGITGAHHHAQLIFVFLVEMGFHHVGQAGLELLTSGDSSASASQSAGIAGMSYRARPRALYFKENKSKVGARQLLETREEHLSSRLLILTQAERLCMGRRFFTAFHIFNELPCKGDCICLQTCQTQ

SEQ ID NO: 4637 - protein, 342 aa, Homo sapiens
MSPAPDAAPAPASISLFDLSADAPVFQGLSLVSHAPGEALARAPRTSCSGSGERESPERKLLQGPMDISEKLFCSTCDQTFQNHQEQREHYKLDWHRFNLKQRLKDKPLLSALDFEKQSSTGDLSSISGSEDSDSASEEDLQTLDRERATFEKLSRPPGFYPHRVLFQNAQGQFLYAYRCVLGPHQDPPEEAELLLQNLQSRGPRDCVVLMAAAGHFAGAIFQGREVVTHKTFHRYTVRAKRGTAQGLRDARGGPSHSAGANLRRYNEATLYKDVRDLLAGPSWAKALEEAGTILLRAPRSGRSLFFGGKGAPLQRGIPDFGISPSPPADPPSKSYSVCSIS

SEQ ID NO: 4638 - protein, 463 aa, Homo sapiens
MVHSSMGAPEIRMSKPLEAEKQGLDSPSEHTDTERNGPDTNHQNPQNKTSPFSVSPTGPSTKIKAEDPSGDSAPAAPLPPQPAQPHLPQAQLMLTGSQLAGDIQQLLQLQQLVLVPGHHLQPPAQFLLPQAQQSQPGLLPTPNLFQLPQQTQGALLTSQPRAGLPTQPPKCLEPPSHPEEPSDLEELEQFARTFKQRRIKLGFTQGDVGLAMGKLYGNDFSQTTISRFEALNLSFKNMCKLKPLLEKWLNDAETMSVDSSLPSPNQLSSPSLGFDGLPGRRRKKRTSIETNVRFALEKSFLANQKPTSEEILLIAEQLHMEKEVIRVWFCNRRQKEKRINPCSAAPMLPSPGKPASYSPHMVTPQGGAGTLPLSQASSSLSTTVTTLSSAVGTLHPSRTAGGGGGGGGAAPPLNSIPSVTPPPPATTNSTNPSPQGSHSAIGLSGLNPSTGPGLWWNPAPYQP

SEQ ID NO: 4639 - protein, 454 aa, Homo sapiens
MAEMGSKGVTAGKIASNVQKKLTRAQEKVLQKLGKADETKDEQFEQCVQNFNKQLTEGTRLQKDLRTYLASVKAMHEASKKLNECLQEVYEPDWPGRDEANKIAENNDLLWMDYHQKLVDQALLTMDTYLGQFPDIKSRIAKRGRKLVDYDSARHHYESLQTAKKKDEAKIAKAEEELIKAQKVFEEMNVDLQEELPSLWNSRVGFYVNTFQSIAGLEENFHKEMSKLNQNLNDVLVGLEKQHGSNTFTVKAQPRKKSKLFSRLRRKKNSDNAPAKGNKSPSPPDGSPAATPEIRVNHEPEPAGGATPGATLPKSPSQPAEASEVAGGTQPAAGAQEPGETAASEAASSSLPAVVVETFPATVNGTVEGGSGAGRLDLPPGFMFKVQAQHDYTATDTDELQLKAGDVVLVIPFQNPEEQDEGWLMGVKESDWNQHKELEKCRGVFPENFTERVP

SEQ ID NO: 4640 - protein, 593 aa, Homo sapiens
MAEMGSKGVTAGKIASNVQKKLTRAQEKVLQKLGKADETKDEQFEQCVQNFNKQLTEGTRLQKDLRTYLASVKAMHEASKKLNECLQEVYEPDWPGRDEANKIAENNDLLWMDYHQKLVDQALLTMDTYLGQFPDIKSRIAKRGRKLVDYDSARHHYESLQTAKKKDEAKIAKPVSLLEKAAPQWCQGKLQAHLVAQTNLLRNQAEEELIKAQKVFEEMNVDLQEELPSLWNSRVGFYVNTFQSIAGLEENFHKEMSKLNQNLNDVLVGLEKQHGSNTFTVKAQPSDNAPAKGNKSPSPPDGSPAATPEIRVNHEPEPAGGATPGATLPKSPSQLRKGPPVPPPPKHTPSKEVKQEQILSLFEDTFVPEISVTTPSQFEAPGPFSEQASLLDLDFDPLPPVTSPVKAPTPSGQSIPWDLWEPTESPAGSLPSGEPSAAEGTFAVSWPSQTAEPGPAQPAEASEVAGGTQPAAGAQEPGETAASEAASSSLPAVVVETFPATVNGTVEGGSGAGRLDLPPGFMFKVQAQHDYTATDTDELQLKAGDVVLVIPFQNPEEQDEGWLMGVKESDWNQHKELEKCRGVFPENFTERVP

SEQ ID NO: 4641 - protein, 550 aa, Homo sapiens
MAEMGSKGVTAGKIASNVQKKLTRAQEKVLQKLGKADETKDEQFEQCVQNFNKQLTEGTRLQKDLRTYLASVKAMHEASKKLNECLQEVYEPDWPGRDEANKIAENNDLLWMDYHQKLVDQALLTMDTYLGQFPDIKSRIAKRGRKLVDYDSARHHYESLQTAKKKDEAKIAKPVSLLEKAAPQWCQGKLQAHLVAQTNLLRNQAEEELIKAQKVFEEMNVDLQEELPSLWNSRVGFYVNTFQSIAGLEENFHKEMSKLNQNLNDVLVGLEKQHGSNTFTVKAQPSDNAPAKGNKSPSPPDGSPAATPEIRVNHEPEPAGGATPGATLPKSPSQFEAPGPFSEQASLLDLDFDPLPPVTSPVKAPTPSGQSIPWDLWEPTESPAGSLPSGEPSAAEGTFAVSWPSQTAEPGPAQPAEASEVAGGTQPAAGAQEPGETAASEAASSSLPAVVVETFPATVNGTVEGGSGAGRLDLPPGFMFKVQAQHDYTATDTDELQLKAGDVVLVIPFQNPEEQDEGWLMGVKESDWNQHKELEKCRGVFPENFTERVP

SEQ ID NO: 4642 - protein, 506 aa, Homo sapiens
MAEMGSKGVTAGKIASNVQKKLTRAQEKVLQKLGKADETKDEQFEQCVQNFNKQLTEGTRLQKDLRTYLASVKAMHEASKKLNECLQEVYEPDWPGRDEANKIAENNDLLWMDYHQKLVDQALLTMDTYLGQFPDIKSRIAKRGRKLVDYDSARHHYESLQTAKKKDEAKIAKPVSLLEKAAPQWCQGKLQAHLVAQTNLLRNQAEEELIKAQKVFEEMNVDLQEELPSLWNSRVGFYVNTFQSIAGLEENFHKEMSKLNQNLNDVLVGLEKQHGSNTFTVKAQPSDNAPAKGNKSPSPPDGSPAATPEIRVNHEPEPAGGATPGATLPKSPSQPTESPAGSLPSGEPSAAEGTFAVSWPSQTAEPGPAQPAEASEVAGGTQPAAGAQEPGETAASEAASSSLPAVVVETFPATVNGTVEGGSGAGRLDLPPGFMFKVQAQHDYTATDTDELQLKAGDVVLVIPFQNPEEQDEGWLMGVKESDWNQHKELEKCRGVFPENFTERVP

SEQ ID NO: 4643 - protein, 497 aa, Homo sapiens
MAEMGSKGVTAGKIASNVQKKLTRAQEKVLQKLGKADETKDEQFEQCVQNFNKQLTEGTRLQKDLRTYLASVKAMHEASKKLNECLQEVYEPDWPGRDEANKIAENNDLLWMDYHQKLVDQALLTMDTYLGQFPDIKSRIAKRGRKLVDYDSARHHYESLQTAKKKDEAKIAKAEEELIKAQKVFEEMNVDLQEELPSLWNSRVGFYVNTFQSIAGLEENFHKEMSKLNQNLNDVLVGLEKQHGSNTFTVKAQPRKKSKLFSRLRRKKNSDNAPAKGNKSPSPPDGSPAATPEIRVNHEPEPAGGATPGATLPKSPSQLRKGPPVPPPPKHTPSKEVKQEQILSLFEDTFVPEISVTTPSQPAEASEVAGGTQPAAGAQEPGETAASEAASSSLPAVVVETFPATVNGTVEGGSGAGRLDLPPGFMFKVQAQHDYTATDTDELQLKAGDVVLVIPFQNPEEQDEGWLMGVKESDWNQHKELEKCRGVFPENFTERVP

SEQ ID NO: 4644 - protein, 518 aa, Homo sapiens
MAEMGSKGVTAGKIASNVQKKLTRAQEKVLQKLGKADETKDEQFEQCVQNFNKQLTEGTRLQKDLRTYLASVKAMHEASKKLNECLQEVYEPDWPGRDEANKIAENNDLLWMDYHQKLVDQALLTMDTYLGQFPDIKSRIAKRGRKLVDYDSARHHYESLQTAKKKDEAKIAKAEEELIKAQKVFEEMNVDLQEELPSLWNSRVGFYVNTFQSIAGLEENFHKEMSKLNQNLNDVLVGLEKQHGSNTFTVKAQPSDNAPAKGNKSPSPPDGSPAATPEIRVNHEPEPAGGATPGATLPKSPSQLRKGPPVPPPPKHTPSKEVKQEQILSLFEDTFVPEISVTTPSQPTESPAGSLPSGEPSAAEGTFAVSWPSQTAEPGPAQPAEASEVAGGTQPAAGAQEPGETAASEAASSSLPAVVVETFPATVNGTVEGGSGAGRLDLPPGFMFKVQAQHDYTATDTDELQLKAGDVVLVIPFQNPEEQDEGWLMGVKESDWNQHKELEKCRGVFPENFTERVP

SEQ ID NO: 4645 - protein, 482 aa, Homo sapiens
MAEMGSKGVTAGKIASNVQKKLTRAQEKVLQKLGKADETKDEQFEQCVQNFNKQLTEGTRLQKDLRTYLASVKAMHEASKKLNECLQEVYEPDWPGRDEANKIAENNDLLWMDYHQKLVDQALLTMDTYLGQFPDIKSRIAKRGRKLVDYDSARHHYESLQTAKKKDEAKIAKAEEELIKAQKVFEEMNVDLQEELPSLWNSRVGFYVNTFQSIAGLEENFHKEMSKLNQNLNDVLVGLEKQHGSNTFTVKAQPSDNAPAKGNKSPSPPDGSPAATPEIRVNHEPEPAGGATPGATLPKSPSQLRKGPPVPPPPKHTPSKEVKQEQILSLFEDTFVPEISVTTPSQPAEASEVAGGTQPAAGAQEPGETAASEAASSSLPAVVVETFPATVNGTVEGGSGAGRLDLPPGFMFKVQAQHDYTATDTDELQLKAGDVVLVIPFQNPEEQDEGWLMGVKESDWNQHKELEKCRGVFPENFTERVP

SEQ ID NO: 4646 - protein, 475 aa, Homo sapiens
MAEMGSKGVTAGKIASNVQKKLTRAQEKVLQKLGKADETKDEQFEQCVQNFNKQLTEGTRLQKDLRTYLASVKAMHEASKKLNECLQEVYEPDWPGRDEANKIAENNDLLWMDYHQKLVDQALLTMDTYLGQFPDIKSRIAKRGRKLVDYDSARHHYESLQTAKKKDEAKIAKAEEELIKAQKVFEEMNVDLQEELPSLWNSRVGFYVNTFQSIAGLEENFHKEMSKLNQNLNDVLVGLEKQHGSNTFTVKAQPSDNAPAKGNKSPSPPDGSPAATPEIRVNHEPEPAGGATPGATLPKSPSQPTESPAGSLPSGEPSAAEGTFAVSWPSQTAEPGPAQPAEASEVAGGTQPAAGAQEPGETAASEAASSSLPAVVVETFPATVNGTVEGGSGAGRLDLPPGFMFKVQAQHDYTATDTDELQLKAGDVVLVIPFQNPEEQDEGWLMGVKESDWNQHKELEKCRGVFPENFTERVP

SEQ ID NO: 4647 - protein, 439 aa, Homo sapiens
MAEMGSKGVTAGKIASNVQKKLTRAQEKVLQKLGKADETKDEQFEQCVQNFNKQLTEGTRLQKDLRTYLASVKAMHEASKKLNECLQEVYEPDWPGRDEANKIAENNDLLWMDYHQKLVDQALLTMDTYLGQFPDIKSRIAKRGRKLVDYDSARHHYESLQTAKKKDEAKIAKAEEELIKAQKVFEEMNVDLQEELPSLWNSRVGFYVNTFQSIAGLEENFHKEMSKLNQNLNDVLVGLEKQHGSNTFTVKAQPSDNAPAKGNKSPSPPDGSPAATPEIRVNHEPEPAGGATPGATLPKSPSQPAEASEVAGGTQPAAGAQEPGETAASEAASSSLPAVVVETFPATVNGTVEGGSGAGRLDLPPGFMFKVQAQHDYTATDTDELQLKAGDVVLVIPFQNPEEQDEGWLMGVKESDWNQHKELEKCRGVFPENFTERVP

SEQ ID NO: 4648 - protein, 409 aa, Homo sapiens
MAEMGSKGVTAGKIASNVQKKLTRAQEKVLQKLGKADETKDEQFEQCVQNFNKQLTEGTRLQKDLRTYLASVKAMHEASKKLNECLQEVYEPDWPGRDEANKIAENNDLLWMDYHQKLVDQALLTMDTYLGQFPDIKSRIAKRGRKLVDYDSARHHYESLQTAKKKDEAKIAKAEEELIKAQKVFEEMNVDLQEELPSLWNSRVGFYVNTFQSIAGLEENFHKEMSKLNQNLNDVLVGLEKQHGSNTFTVKAQPSDNAPAKGNKSPSPPDGSPAATPEIRVNHEPEPAGGATPGATLPKSPSQSSLPAVVVETFPATVNGTVEGGSGAGRLDLPPGFMFKVQAQHDYTATDTDELQLKAGDVVLVIPFQNPEEQDEGWLMGVKESDWNQHKELEKCRGVFPENFTERVP

SEQ ID NO: 4649 - protein, 179 aa, Homo sapiens
MAVFKTTLWRLISGTLGIICLSLMATLGILLKNSFTKLSIEPAFTPGPNIELQKDSDCCSCQEKWVGYRCNCYFISSEQKTWNESRHLCASQKSSLLQLQNTDELDFMSSSQQFYWIGLSYSEEHTAWLWENGSALSQYLFPSFETFNTKNCIAYNPNGNALDESCEDKNRYICKQQLI

SEQ ID NO: 4650 - protein, 148 aa, Homo sapiens
MAAFTKLSIEPAFTPGPNIELQKDSDCCSCQEKWVGYRCNCYFISSEQKTWNESRHLCASQKSSLLQLQNTDELDFMSSSQQFYWIGLSYSEEHTAWLWENGSALSQYLFPSFETFNTKNCIAYNPNGNALDESCEDKNRYICKQQLI

SEQ ID NO: 4651 - protein, 619 aa, Homo sapiens
MPDPAAHLPFFYGSISRAEAEEHLKLAGMADGLFLLRQCLRSLGGYVLSLVHDVRFHHFPIERQLNGTYAIAGGKAHCGPAELCEFYSRDPDGLPCNLRKPCNRPSGLEPQPGVFDCLRDAMVRDYVRQTWKLEGEALEQAIISQAPQVEKLIATTAHERMPWYHSSLTREEAERKLYSGAQTDGKFLLRPRKEQGTYALSLIYGKTVYHYLISQDKAGKYCIPEGTKFDTLWQLVEYLKLKADGLIYCLKEACPNSSASNASGAAAPTLPAHPSTLTHPQRRIDTLNSDGYTPEPARITSPDKPRPMPMDTSVYESPYSDPEELKDKKLFLKRDNLLIADIELGCGNFGSVRQGVYRMRKKQIDVAIKVLKQGTEKADTEEMMREAQIMHQLDNPYIVRLIGVCQAEALMLVMEMAGGGPLHKFLVGKREEIPVSNVAELLHQVSMGMKYLEEKNFVHRDLAARNVLLVNRHYAKISDFGLSKALGADDSYYTARSAGKWPLKWYAPECINFRKFSSRSDVWSYGVTMWEALSYGQKPYKKMKGPEVMAFIEQGKRMECPPECPPELYALMSDCWIYKWEDRPDFLTVEQRMRACYYSLASKVEGPPGSTQKAEAACA

SEQ ID NO: 4652 - protein, 312 aa, Homo sapiens
MPMDTSVYESPYSDPEELKDKKLFLKRDNLLIADIELGCGNFGSVRQGVYRMRKKQIDVAIKVLKQGTEKADTEEMMREAQIMHQLDNPYIVRLIGVCQAEALMLVMEMAGGGPLHKFLVGKREEIPVSNVAELLHQVSMGMKYLEEKNFVHRDLAARNVLLVNRHYAKISDFGLSKALGADDSYYTARSAGKWPLKWYAPECINFRKFSSRSDVWSYGVTMWEALSYGQKPYKKMKGPEVMAFIEQGKRMECPPECPPELYALMSDCWIYKWEDRPDFLTVEQRMRACYYSLASKVEGPPGSTQKAEAACA

SEQ ID NO: 4653 - protein, 422 aa, Homo sapiens
MTVFFKTLRNHWKKTTAGLCLLTWGGHWLYGKHCDNLLRRAACQEAQVFGNQLIPPNAQVKKATVFLNPAACKGKARTLFEKNAAPILHLSGMDVTIVKTDYEGQAKKLLELMENTDVIIVAGGDGTLQEVVTGVLRRTDEATFSKIPIGFIPLGETSSLSHTLFAESGNKVQHITDATLAIVKGETVPLDVLQIKGEKEQPVFAMTGLRWGSFRDAGVKVSKYWYLGPLKIKAAHFFSTLKEWPQTHQASISYTGPTERPPNEPEETPVQRPSLYRRILRRLASYWAQPQDALSQEVSPEVWKDVQLSTIELSITTRNNQLDPTSKEDFLNICIEPDTISKGDFITIGSRKVRNPKLHVEGTECLQASQCTLLIPEGAGGSFSIDSEEYEAMPVEVKLLPRKLQFFCDPRKREQMLTSPTQ

SEQ ID NO: 4654 - protein, 219 aa, Homo sapiens
MNRLFGKAKPKAPPPSLTGCIGTVDSRAESIDKKISRLDAELVKYKDQIKKMREGPAKNMVKQKALRVLKQKRMYEQQRDNLAQQSFNMEQANYTIQSLKDTKTTVDAMKLGVKEMKKAYKQVKIDQIEDLQDQLEDMMEDANEIQEALSRSYGTPELDEDDLEAELDALGDELLADEDSSYLDEAASAPAIPEGVPTDTKNKDGVLVDEFGLPQIPAS

SEQ ID NO: 4655 - protein, 1090 aa, Homo sapiens
MMPMILTVFLSNNEQILTEVPITPETTCRDVVEFCKEPGEGSCHLAEVWRGNERPIPFDHMMYEHLQIWGPRREEVKFFLRHEDSPTENSEQGGRQTQEQRTQRNVINVPGDKRTEYGVGNPRVELTLSELQDMAARQQQQIENQQQMLVAKEQRLHFLKQQERRQQQSISENEKLQKLKERVEAQENKLKKIRAMRGQVDYSKIMNGNLSAEIERFSAMFQEKKQEVQTAILRVDQLSQQLEDLKKGKLNGFQSYNGKLTGPAAVELKRLYQELQIRNQLNQEQNSKLQQQKELLNKRNMEVAMMDKRISELRERLYGKKIQLNRVNGTSSPQSPLSTSGRVAAVGPYIQVPSAGSFPVLGDPIKPQSLSIASNAAHGRSKSANDGNWPTLKQNSSSSVKPVQVAGADWKDPSVEGSVKQGTVSSQPVPFSALGPTEKPGIEIGKVPPPIPGVGKQLPPSYGTYPSPTPLGPGSTSSLERRKEGSLPRPSAGLPSRQRPTLLPATGSTPQPGSSQQIQQRISVPPSPTYPPAGPPAFPAGDSKPELPLTVAIRPFLADKGSRPQSPRKGPQTVNSSSIYSMYLQQATPPKNYQPAAHSALNKSVKAVYGKPVLPSGSTSPSPLPFLHGSLSTGTPQPQPPSESTEKEPEQDGPAAPADGSTVESLPRPLSPTKLTPIVHSPLRYQSDADLEALRRKLANAPRPLKKRSSITEPEGPGGPNIQKLLYQRFNTLAGGMEGTPFYQPSPSQDFMGTLADVDNGNTNANGNLEELPPAQPTAPLPAEPAPSSDANDNELPSPEPEELICPQTTHQTAEPAEDNNNNVATVPTTEQIPSPVAEAPSPGEEQVPPAPLPPASHPPATSTNKRTNLKKPNSERTGHGLRVRFNPLALLLDASLEGEFDLVQRIIYEVEDPSKPNDEGITPLHNAVCAGHHHIVKFLLDFGVNVNAADSDGWTPLHCAASCNSVHLCKQLVESGAAIFASTISDIETAADKCEEMEEGYIQCSQFLYGVQEKLGVMNKGVAYALWDYEAQNSDELSFHEGDALTILRRKDESETEWWWARLGDREGYVPKNLLGLYPRIKPRQRTLA

SEQ ID NO: 4656 - protein, 1203 aa, Homo sapiens
MDLRDFYLLAALIACLRLDSAIAQELIYTIREELPENVPIGNIPKDLNISHINAATGTSASLVYRLVSKAGDAPLVKVSSSTGEIFTTSNRIDREKLCAGASYAEENECFFELEVVILPNDFFRLIKIKIIVKDTNDNAPMFPSPVINISIPENTLINSRFPIPSATDPDTGFNGVQHYELLNGQSVFGLDIVETPEGEKWPQLIVQQNLDREQKDTYVMKIKVEDGGTPQKSSTAILQVTVSDVNDNRPVFKEGQVEVHIPENAPVGTSVIQLHATDADIGSNAEIRYIFGAQVAPATKRLFALNNTTGLITVQRSLDREETAIHKVTVLASDGSSTPARATVTINVTDVNDNPPNIDLRYIISPINGTVYLSEKDPVNTKIALITVSDKDTDVNGKVICFIEREVPFHLKAVYDNQYLLETSSLLDYEGTKEFSFKIVASDSGKPSLNQTALVRVKLEDENDNPPIFNQPVIELSVSENNRRGLYLTTISATDEDSGKNADIVYQLGPNASFFDLDRKTGVLTASRVFDREEQERFIFTVTARDNGTPPLQSQAAVIVTVLDENDNSPKFTHNHFQFFVSENLPKYSTVGVITVTDADAGENKAVTLSILNDNDNFVLDPYSGVIKSNVSFDREQQSSYTFDVKATDGGQPPRSSTAKVTINVMDVNDNSPVVISPPSNTSFKLVPLSAIPGSVVAEVFAVDVDTGMNAELKYTIVSGNNKGLFRIDPVTGNITLEEKPAPTDVGLHRLVVNISDLGYPKSLHTLVLVFLYVNDTAGNASYIYDLIRRTMETPLDRNIGDSSQPYQNEDYLTIMIAIIAGAMVVIVVIFVTVLVRCRHASRFKAAQRSKQGAEWMSPNQENKQNKKKKRKKRKSPKSSLLNFVTIEESKPDDAVHEPINGTISLPAELEEQSIGRFDWGPAPPTTFKPNSPDLAKHYKSASPQPAFHLKPDTPVSVKKHHVIQELPLDNTFVGGCDTLSKRSSTSSDHFSASECSSQGGFKTKGPLHTRQSQRRVTFHLPDGSQESCSDSGLGDHEPVGSGTLISHPLPLVQPQDEFYDQASPDKRTEADGNSDPNSDGPLGPRGLAEATEMCTQECLVLGHSDNCWMPPGLGPYQHPKSPLSTFAPQKEWVKKDKLVNGHTLTRAWKEDSNRNQFNDRKQYGSNEGHFNNGSHMTDIPLANLKSYKQAGGATESPKEHQL

SEQ ID NO: 4657 - protein, 1237 aa, Homo sapiens
MDLRDFYLLAALIACLRLDSAIAQELIYTIREELPENVPIGNIPKDLNISHINAATGTSASLVYRLVSKAGDAPLVKVSSSTGEIFTTSNRIDREKLCAGASYAEENECFFELEVVILPNDFFRLIKIKIIVKDTNDNAPMFPSPVINISIPENTLINSRFPIPSATDPDTGFNGVQHYELLNGQSVFGLDIVETPEGEKWPQLIVQQNLDREQKDTYVMKIKVEDGGTPQKSSTAILQVTVSDVNDNRPVFKEGQVEVHIPENAPVGTSVIQLHATDADIGSNAEIRYIFGAQVAPATKRLFALNNTTGLITVQRSLDREETAIHKVTVLASDGSSTPARATVTINVTDVNDNPPNIDLRYIISPINGTVYLSEKDPVNTKIALITVSDKDTDVNGKVICFIEREVPFHLKAVYDNQYLLETSSLLDYEGTKEFSFKIVASDSGKPSLNQTALVRVKLEDENDNPPIFNQPVIELSVSENNRRGLYLTTISATDEDSGKNADIVYQLGPNASFFDLDRKTGVLTASRVFDREEQERFIFTVTARDNGTPPLQSQAAVIVTVLDENDNSPKFTHNHFQFFVSENLPKYSTVGVITVTDADAGENKAVTLSILNDNDNFVLDPYSGVIKSNVSFDREQQSSYTFDVKATDGGQPPRSSTAKVTINVMDVNDNSPVVISPPSNTSFKLVPLSAIPGSVVAEVFAVDVDTGMNAELKYTIVSGNNKGLFRIDPVTGNITLEEKPAPTDVGLHRLVVNISDLGYPKSLHTLVLVFLYVNDTAGNASYIYDLIRRTMETPLDRNIGDSSQPYQNEDYLTIMIAIIAGAMVVIVVIFVTVLVRCRHASRFKAAQRSKQGAEWMSPNQENKQNKKKKRKKRKSPKSSLLNFVTIEESKPDDAVHEPINGTISLPAELEEQSIGRFDWGPAPPTTFKPNSPDLAKHYKSASPQPAFHLKPDTPVSVKKHHVIQELPLDNTFVGGCDTLSKRSSTSSDHFSASECSSQGGFKTKGPLHTRQCNSHSKSDNIPVTPQKCPSSTGFHIQENEESHYESQRRVTFHLPDGSQESCSDSGLGDHEPVGSGTLISHPLPLVQPQDEFYDQASPDKRTEADGNSDPNSDGPLGPRGLAEATEMCTQECLVLGHSDNCWMPPGLGPYQHPKSPLSTFAPQKEWVKKDKLVNGHTLTRAWKEDSNRNQFNDRKQYGSNEGHFNNGSHMTDIPLANLKSYKQAGGATESPKEHQL

SEQ ID NO: 4658 - protein, 793 aa, Homo sapiens
MESRAEGGSPAVFDWFFEAACPASLQEDPPILRQFPPDFRDQEAMQMVPKFCFPFDVEREPPSPAVQHFTFALTDLAGNRRFGFCRLRAGTQSCLCILSHLPWFEVFYKLLNTVGDLLAQDQVTEAEELLQNLFQQSLSGPQASVGLELGSGVTVSSGQGIPPPTRGNSKPLSCFVAPDSGRLPSIPENRNLTELVVAVTDENIVGLFAALLAERRVLLTASKLSTLTSCVHASCALLYPMRWEHVLIPTLPPHLLDYCCAPMPYLIGVHASLAERVREKALEDVVVLNVDANTLETTFNDVQALPPDVVSLLRLRLRKVALAPGEGVSRLFLKAQALLFGGYRDALVCSPGQPVTFSEEVFLAQKPGAPLQAFHRRAVHLQLFKQFIEARLEKLNKGEGFSDQFEQEITGCGASPGALRSYQLWADNLKKGGGALLHSVKAKTQPAVKNMYRSAKSGLKGVQSLLMYKDGDSVLQRGGSLRAPALPSRSDRLQQRLPITQHFGKNRPLRPSRRRQLEEGTSEPPGAGTPPLSPEDEGCPWAEEALDSSFLGSGEELDLLSEILDSLSMGAKSAGSLRPSQSLDCCHRGDLDSCFSLPNILRWQPDDKKLPEPEPQPLSLPSLQNASSLDATSSSKDSRSQLIPSESDQEVTSPSQSSTASADPSIWGDPKPSPLTEPLILHLTPSHKAAEDFTAQENPTPWLSTAPTEPSPPESPQILAPTKPNFDIAWTSQPLDPSSDPSSLEDPRARPPKALLAERAHLQPREEPGALNSPATPTSNCQKSQPSKPAQSR

SEQ ID NO: 4659 - protein, 114 aa, Homo sapiens
MRKIDLCLSSEGSEVILATSSDEKHPPENIIDGNPETFWTTTGMFPQEFIICFHKHVRIERLVIQSYFVQTLKIEKTRLKSQLILSNGLKKIWYTQRGSFKMKKLWHMMAPLLT

SEQ ID NO: 4660 - protein, 478 aa, Homo sapiens
MAGVEEVAASGSHLNGDLDPDDREEGAASTAEEAAKKKRRKKKKSKGPSAAGEQEPDKESGASVDEVARQLERSALEDKERDEDDEDGDGDGDGATGKKKKKKKKKRGPKVQTDPPSVPICDLYPNGVFPKGQECEYPPTQDGRTAAWRTTSEEKKALDQASEEIWNDFREAAEAHRQVRKYVMSWIKPGMTMIEICEKLEDCSRKLIKENGLNAGLAFPTGCSLNNCAAHYTPNAGDTTVLQYDDICKIDFGTHISGRIIDCAFTVTFNPKYDTLLKAVKDATNTGIKCAGIDVRLCDVGEAIQEVMESYEVEIDGKTYQVKPIRNLNGHSIGQYRIHAGKTVPIVKGGEATRMEEGEVYAIETFGSTGKGVVHDDMECSHYMKNFDVGHVPIRLPRTKHLLNVINENFGTLAFCRRWLDRLGESKYLMALKNLCDLGIVDPYPPLCDIKGSYTAQFEHTILLRPTCKEVVSRGDDY

SEQ ID NO: 4661 - protein, 289 aa, Homo sapiens
MVGVKPVGSDPDFQPELSGAGSRLAVVKFTMRGCGPCLRIAPAFSSMSNKYPQAVFLEVDVHQCQGTAATNNISATPTFLFFRNKVRIDQYQGADAVGLEEKIKQHLENDPGSNEDTDIPKGYMDLMPFINKAGCECLNESDEHGFDNCLRKDTTFLESDCDEQLLITVAFNQPVKLYSMKFQGPDNGQGPKYVKIFINLPRSMDFEEAERSEPTQALELTEDDIKEDGIVPLRYVKFQNVNSVTIFVQSNQGEEETTRISYFTFIGTPVQATNMNDFKRVVGKKGESH

SEQ ID NO: 4662 - protein, 750 aa, Homo sapiens
MLSSRWWPSSWGILGLGPRSPPRGSQLCALYAFTYTGADGQQVSLAEGDRFLLLRKTNSDWWLARRLEAPSTSRPIFVPAAYMIEESIPSQSPTTVIPGQLLWTPGPKLFHGSLEELSQALPSRAQASSEQPPPLPRKMCRSVSTDNLSPSFLKPFQEGPSGRSLSQEDLPSEASASTAGPQPLMSEPPVYCNLVDLRRCPRSPPPGPACPLLQRLDAWEQHLDPNSGRCFYINSLTGCKSWKPPRRSRSETNPGSMEGTQTLKRNNDVLQPQAKGFRSDTGTPEPLDPQGSLSLSQRTSQLDPPALQAPRPLPQLLDDPHEVEKSGLLNMTKIAQGGRKLRKNWGPSWVVLTGNSLVFYREPPPTAPSSGWGPAGSRPESSVDLRGAALAHGRHLSSRRNVLHIRTIPGHEFLLQSDHETELRAWHRALRTVIERLVRWVEARREAPTGRDQGSGDRENPLELRLSGSGPAELSAGEDEEEESELVSKPLLRLSSRRSSIRGPEGTEQNRVRNKLKRLIAKRPPLQSLQERGLLRDQVFGCQLESLCQREGDTVPSFLRLCIAAVDKRGLDVDGIYRVSGNLAVVQKLRFLVDRERAVTSDGRYVFPEQPGQEGRLDLDSTEWDDIHVVTGALKLFLRELPQPLVPPLLLPHFRAALALSESEQCLSQIQELIGSMPKPNHDTLRYLLEHLCRVIAHSDKNRMTPHNLGIVFGPTLFRPEQETSDPAAHALYPGQLVQLMLTNFTSLFP

SEQ ID NO: 4663 - protein, 242 aa, Homo sapiens
MVSGRFYLSCLLLGSLGSMCILFTIYWMQYWRGGFAWNGSIYMFNWHPVLMVAGMVVFYGGASLVYRLPQSWVGPKLPWKLLHAALHLMAFVLTVVGLVAVFTFHNHGRTANLYSLHSWLGTTTVFLFACQWFLGFAVFLLPWASMWLRSLLKPIHVFFGAAILSLSIASVISGINEKLFFSLKNTTRPYHSLPSEAVFANSTGMLVVAFGLLVLYILLASSWKRPEPGILTDRQPLLHDGE

SEQ ID NO: 4664 - protein, 252 aa, Homo sapiens
MEDGVAGPQLGAAAEAAEAAEARARPGVTLRPFAPLSGAAEADEGGGDWSFIDCEMEEVDLQDLPSATIACHLDPRVFVDGLCRAKFESLFRTYDKDITFQYFKSFKRVRINFSNPFSAADARLQLHKTEFLGKEMKLYFAQTLHIGSSHLAPPNPDKQFLISPPASPPVGWKQVEDATPVINYDLLYAISKLGPGEKYELHAATDTTPSVVVHVCESDQEKEEEEEMERMRRPKPKIIQTRRPEYTPIHLS

SEQ ID NO: 4665 - protein, 117 aa, Homo sapiens
MKLYFAQTLHIGSSHLAPPNPDKQFLISPPASPPVGWKQVEDATPVINYDLLYAISKLGPGEKYELHAATDTTPSVVVHVCESDQEKEEEEEMERMRRPKPKIIQTRRPEYTPIHLS

SEQ ID NO: 4666 - protein, 197 aa, Homo sapiens
MHFRNFNYSFSSLIACVANSDIFSESETRAKFESLFRTYDKDITFQYFKSFKRVRINFSNPFSAADARLQLHKTEFLGKEMKLYFAQTLHIGSSHLAPPNPDKQFLISPPASPPVGWKQVEDATPVINYDLLYAISKLGPGEKYELHAATDTTPSVVVHVCESDQEKEEEEEMERMRRPKPKIIQTRRPEYTPIHLS

SEQ ID NO: 4667 - protein, 1147 aa, Homo sapiens
MDAVNAFNQELFSLMDMKPPISRAKMILITKAAIKAIKLYKHVVQIVEKFIKKCKPEYKVPGLYVIDSIVRQSRHQFGTDKDVFGPRFSKNITATFQYLYLCPSEDKSKIVRVLNLWQKNGVFKIEIIQPLLDMAAGTSNAAPVAENVTNNEGSPPPPVKVSSEPPTQATPNSVPAVPQLPSSDAFAAVAQLFQTTQGQQLQQILQTFQQPPKPQSPALDNAVMAQVQAITAQLKTTPTQPSEQKAAFPPPEQKTAFDKKLLDRFDYDDEPEAVEESKKEDTTAVTTTAPAAAVPPAPTATVPAAAAPAAASPPPPQAPFGFPGDGMQQPAYTQHQNMDQFQPRMMGIQQDPMHHQVPLPPNGQMPGFGLLPTPPFPPMAQPVIPPTPPVQQPFQASFQAQNEPLTQKPHQQEMEVEQPCIQEVKRHMSDNRKSRSRSASRSPKRRRSRSGSRSRRSRHRRSRSRSRDRRRHSPRSRSQERRDREKERERRQKGLPQVKPETASVCSTTLWVGQLDKRTTQQDVASLLEEFGPIESINMIPPRGCAYIVMVHRQDAYRALQKLSRGNYKVNQKSIKIAWALNKGIKADYKQYWDVELGVTYIPWDKVKPEELESFCEGGMLDSDTLNPDWKGIPKKPENEVAQNGGAETSHTEPVSPIPKPLPVPVPPIPVPAPITVPPPQVPPHQPGPPVVGALQPPAFTPPLGIPPPGFGPGVPPPPPPPPFLRPGFNPMHLPPGFLPPGPPPPITPPVSIPPPHTPPISIPNSTIAGINEDTTKDLSIGNPIPTVVSGARGNAESGDSVKMYGSAVPPAAPTNLPTPPVTQPVSLLGTQGVAPGPVIGLQAPSTGLLGARPGLIPLQRPPGMPPPHLQRFPLMPPRPMPPHMMHRGPPPGPGGFAMPPPHGMKGPFPPHGPFVRPGGMPGLGGPGPGPGGPEDRDGRQQPPQQPQQQPQPQAPQQPQQQQQQQPPPSQQPPPTQQQPQQFRNDNRQQFNSGRDQERFGRRSFGNRVENDRERYGNRNDDRDNSNRDRREWGRRSPDRDRHRDLEERNRRSSGHRDRERDSRDRESRREKEEARGKEKPEVTDRAGGNKTVEPPISQVGNVDTASELEKGVSEAAVLKPSEELPAEATSSVEPEKDSGSAAEAPR

SEQ ID NO: 4668 - protein, 100 aa, Homo sapiens
MATASGASDLSGSGAPPPGVGAQAAAAAEEEEREVVRVRVKKCESFLPPEFRSFAVDPQITSLDVLQHILIRAFDLSGPIARRLGHNQPQRCHWLRRVAG

SEQ ID NO: 4669 - protein, 688 aa, Homo sapiens
MATASGASDLSGSGAPPPGVGAQAAAAAEEEEREVVRVRVKKCESFLPPEFRSFAVDPQITSLDVLQHILIRAFDLSGKKNFGISYLGRDRLGQEVYLSLLSDWDLSTAFATASKPYLQLRVDIRPSEDSPLLEDWDIISPKDVIGSDVLLAEKRSSLTTAALPFTQSILTQVGRTLSKVQQVLSWSYGEDVKPFKPPLSDAEFHTYLNHEGQLSRPEELRLRIYHGGVEPSLRKVVWRYLLNVYPDGLTGRERMDYMKRKSREYEQLKSEWAQRANPEDLEFIRSTVLKDVLRTDRAHPYYAGPEDGPHLRALHDLLTTYAVTHPQVSYCQGMSDLASPILAVMDHEGHAFVCFCGIMKRLAANFHPDGRAMATKFAHLKLLLRHADPDFYQYLQEAGADDLFFCYRWLLLELKREFAFDDALRMLEVTWSSLPPDPPEHEVELVGPPSQVADAGFGGHRGWPVRQRHMLRPAGGGGSTFEDAVDHLATASQGPGGGGRLLRQASLDGLQQLRDNMGSRRDPLVQLPHPAALISSKSLSEPLLNSPDPLLSSFSHPDSPSSSSPPSTQEASPTGDMAVGSPLMQEVGSPKDPGKSLPPVPPMGLPPPQEFGRGNPFMLFLCLAILLEHRDHIMRNGLDYNELAMHFDRLVRKHHLGRVLRRARALFADYLQSEVWDSEEGAEATAAS

SEQ ID NO: 4670 - protein, 887 aa, Homo sapiens
MGEAEKFHYIYSCDLDINVQLKIGSLEGKREQKSYKAVLEDPMLKFSGLYQETCSDLYVTCQVFAEGKPLALPVRTSYKAFSTRWNWNEWLKLPVKYPDLPRNAQVALTIWDVYGPGKAVPVGGTTVSLFGKYGMFRQGMHDLKVWPNVEADGSEPTKTPGRTSSTLSEDQMSRLAKLTKAHRQGHMVKVDWLDRLTFREIEMINESEKRSSNFMYLMVEFRCVKCDDKEYGIVYYEKDGDESSPILTSFELVKVPDPQMSMENLVESKHHKLARSLRSGPSDHDLKPNAATRDQLNIIVSYPPTKQLTYEEQDLVWKFRYYLTNQEKALTKFLKCVNWDLPQEAKQALELLGKWKPMDVEDSLELLSSHYTNPTVRRYAVARLRQADDEDLLMYLLQLVQALKYENFDDIKNGLEPTKKDSQSSVSENVSNSGINSAEIDSSQIITSPLPSVSSPPPASKTKEVPDGENLEQDLCTFLISRACKNSTLANYLYWYVIVECEDQDTQQRDPKTHEMYLNVMRRFSQALLKGDKSVRVMRSLLAAQQTFVDRLVHLMKAVQRESGNRKKKNERLQALLGDNEKMNLSDVELIPLPLEPQVKIRGIIPETATLFKSALMPAQLFFKTEDGGKYPVIFKHGDDLRQDQLILQIISLMDKLLRKENLDLKLTPYKVLATSTKHGFMQFIQSVPVAEVLDTEGSIQNFFRKYAPSENGPNGISAEVMDTYVKSCAGYCVITYILGVGDRHLDNLLLTKTGKLFHIDFGYILGRDPKPLPPPMKLNKEMVEGMGGTQSEQYQEFRKQCYTAFLHLRRYSNLILNLFSLMVDANIPDIALEPDKTVKKVQDKFRLDLSDEEAVHYMQSLIDESVHALFAAVVEQIHKFAQYWRK

SEQ ID NO: 4671 - protein, 567 aa, Homo sapiens
MLERRCRGPLAMGLAQPRLLSGPSQESPQTLGKESRGLRQQGTSVAQSGAQAPGRAHRCAHCRRHFPGWVALWLHTRRCQARLPLPCPECGRRFRHAPFLALHRQVHAAATPDLGFACHLCGQSFRGWVALVLHLLAHSAAKQPIACPKCERRFWRRKQLRAHLRRCHPPAPEARPFICGNCGRSFAQWDQLVAHKRVHVAEALEEAAAKALGPRPRGRPAVTAPRPGGDAVDRPFQCACCGKRFRHKPNLIAHRRVHTGERPHQCPECGKRFTNKPYLTSHRRIHTGEKPYPCKECGRRFRHKPNLLSHSKIHKRSEGSAQAAPGPGSPQLPAGPQESAAEPTPAVPLKPAQEPPPGAPPEHPQDPIEAPPSLYSCDDCGRSFRLERFLRAHQRHDTGERPFTCAECGKNFGKKTHLVAHSPVHSGERPFACEECGRRFSQGSHLAAHRPDHAPDRPFVCPDCGKAFRHKPYLARHRRIHTGEKPYVCPDCGKAFSQKSNLVSHRRIHTGERPYACPDCDRSFSQKSNLITHRKSHIRDGAFCCAICGQTFDDEERLLAHQKKHDV

SEQ ID NO: 4672 - protein, 556 aa, Homo sapiens
MGPAQPRLLSGPSQESPQTLGKESRGLRQQGTSVAQSGAQAPGRAHRCAHCRRHFPGWVALWLHTRRCQARLPLPCPECGRRFRHAPFLALHRQVHAAATPDLGFACHLCGQSFRGWVALVLHLRAHSAAKRPIACPKCERRFWRRKQLRAHLQRCHPPAPAARPFICGNCGRSFAQWDQLVAHKRVHVAEALEEAAAKVLGPRSRGRPAVTAPRPGGDAVDRPFQCACCGKRFRHKPNLIAHRRVHTGERPHQCPECGKRFTNKPYLTSHRRIHTGEKPYPCKECGRRFRHKPNLLSHSKIHKRSEGSAQAAPGPGSPQLPAGPQESAAEPTPAVPLKPAQEPPPGAPPEHPQDPIEAPPSLYSCDDCGRSFRLERFLRAHQRQHTGERPFTCAECGKNFGKKTHLVAHSRVHSGERPFACEECGRRFSQGSHLAAHRRDHAPDRPFVCPDCGKAFRHKPYLAAHRRIHTGEKPYVCPDCGKAFRQKSNLVSHRRIHTGERSYACPDCDRSFSQKSNLITHRKSHIRDGAFCCAICGQTFDDEERLLAHQKKHDV

SEQ ID NO: 4673 - protein, 1101 aa, Homo sapiens
MKSRQKGKKKGSAKERVFGCDLQEHLQHSGQEVPQVLKSCAEFVEEYGVVDGIYRLSGVSSNIQKLRQEFESERKPDLRRDVYLQDIHCVSSLCKAYFRELPDPLLTYRLYDKFAEAVGVQLEPERLVKILEVLRELPVPNYRTLEFLMRHLVHMASFSAQTNMHARNLAIVWAPNLLRSKDIEASGFNGTAAFMEVRVQSIVVEFILTHVDQLFGGAALSGGEVESGWRSLPGTRASGSPEDLMPRPLPYHLPSILQAGDGPPQMRPYHTIIEIAEHKRKGSLKVRKWRSIFNLGRSGHETKRKLPRGAEDREDKSNKGTLRPAKSMDSLSAAAGASDEPEGLVGPSSPRPSPLLPESLENDSIEAAEGEQEPEAEALGGTNSEPGTPRAGRSAIRAGGSSRAERCAGVHISDPYNVNLPLHITSILSVPPNIISNVSLARLTRGLECPALQHRPSPASGPGPGPGLGPGPPDEKLEASPASSPLADSGPDDLAPALEDSLSQEVQDSFSFLEDSSSSEPEWVGAEDGEVAQAEAAGAAFSPGEDDPGMGYLEELLGVGPQVEEFSVEPPLDDLSLDEAQFVLAPSCCSLDSAGPRPEVEEENGEEVFLSAYDDLSPLLGPKPPIWKGSGSLEGEAAGCGRQALGQGGEEQACWEVGEDKQAEPGGRLDIREEAEGSPETKVEAGKASEDRGEAGGSQETKVRLREGSREETEAKEEKSKGQKKADSMEAKGVEEPGGDEYTDEKEKEIEREEDEQREEAQVEAGRDLEQGAQEDQVAEEKWEVVQKQEAEGVREDEDKGQREKGYHEARKDQGDGEDSRSPEAATEGGAGEVSKERESGDGEAEGDQRAGGYYLEEDTLSEGSGVASLEVDCAKEGNPHSSEMEEVAPQPPQPEEMEPEGQPSPDGCLCPCSLGLGGVGMRLASTLVQVQQVRSVPVVPPKPQFAKMPSAMCSKIHVAPANPCPRPGRLDGTPGERAWGSRASRSSWRNGGSLSFDAAVALARDRQRTEAQGVRRTQTCTEGGDYCLIPRTSPCSMISAHSPRPLSCLELPSEGAEGSGSRSRLSLPPREPQVPDPLLSSQRRSYAFETQANPGKGEGL

SEQ ID NO: 4674 - protein, 890 aa, Homo sapiens
MKSRQKGKKKGSAKERVFGCDLQEHLQHSGQEVPQVLKSCAEFVEEYGVVDGIYRLSGVSSNIQKLRQEFESERKPDLRRDVYLQDIHCVSSLCKAYFRELPDPLLTYRLYDKFAEAVGVQLEPERLVKILEVLRELPVPNYRTLEFLMRHLVHMASFSAQTNMHARNLAIVWAPNLLRSKDIEASGFNGTAAFMEVRVQSIVVEFILTHVDQLFGGAALSGGEVESGWRSLPGTRASGSPEDLMPRPLPYHLPSILQAGDGPPQMRPYHTIIEIAEHKRKGSLKVRKWRSIFNLGRSGHETKRKLPRGAEDREDKSNKGTLRPAKSMDSLSAAAGASDEPEGLVGPSSPRPSPLLPESLENDSIEAAEGEQEPEAEALGGTNSEPGTPRAGRSAIRAGGSSRAERCAGVHISDPYNVNLPLHITSILSVPPNIISNVSLARLTRGLECPALQHRPSPASGPGPGPGLGPGPPDEKLEASPASSPLADSGPDDLAPALEDSLSQEVQDSFSFLEDSSSSEPEWVGAEDGEVAQAEAAGAAFSPGEDDPGMGYLEELLGVGPQVEEFSVEPPLDDLSLDEAQFVLAPSCCSLDSAGPRPEVEEENGEEVFLSAYDDLSPLLGPKPPIWKGSGSLEGEAAGCGRQALGQGGEEQACWEVGEDKQAEPGGRLDIREEAEGTPQPPQPEEMEPEGQPSPDGCLCPCSLGLGGVGMRLASTLVQVQQVRSVPVVPPKPQFAKMPSAMCSKIHVAPANPCPRPGRLDGTPGERAWGSRASRSSWRNGGSLSFDAAVALARDRQRTEAQGVRRTQTCTEGGDYCLIPRTSPCSMISAHSPRPLSCLELPSEGAEGSGSRSRLSLPPREPQVPDPLLSSQRRSYAFETQANPGKGEGL

SEQ ID NO: 4675 - protein, 893 aa, Homo sapiens
MATEEFIIRIPPYHYIHVLDQNSNVSRVEVGPKTYIRQDNERVLFAPMRMVTVPPRHYCTVANPVSRDAQGLVLFDVTGQVRLRHADLEIRLAQDPFPLYPGEVLEKDITPLQVVLPNTALHLKALLDFEDKDGDKVVAGDEWLFEGPGTYIPRKEVEVVEIIQATIIRQNQALRLRARKECWDRDGKERVTGEEWLVTTVGAYLPAVFEEVLDLVDAVILTEKTALHLRARRNFRDFRGVSRRTGEEWLVTVQDTEAHVPDVHEEVLGVVPITTLGPHNYCVILDPVGPDGKNQLGQKRVVKGEKSFFLQPGEQLEQGIQDVYVLSEQQGLLLRALQPLEEGEDEEKVSHQAGDHWLIRGPLEYVPSAKVEVVEERQAIPLDENEGIYVQDVKTGKVRAVIGSTYMLTQDEVLWEKELPPGVEELLNKGQDPLADRGEKDTAKSLQPLAPRNKTRVVSYRVPHNAAVQVYDYREKRARVVFGPELVSLGPEEQFTVLSLSAGRPKRPHARRALCLLLGPDFFTDVITIETADHARLQLQLAYNWHFEVNDRKDPQETAKLFSVPDFVGDACKAIASRVRGAVASVTFDDFHKNSARIIRTAVFGFETSEAKGPDGMALPRPRDQAVFPQNGLVVSSVDVQSVEPVDQRTRDALQRSVQLAIEITTNSQEAAAKHEAQRLEQEARGRLERQKILDQSEAEKARKELLELEALSMAVESTGTAKAEAESRAEAARIEGEGSVLQAKLKAQALAIETEAELQRVQKVRELELVYARAQLELEVSKAQQLAEVEVKKFKQMTEAIGPSTIRDLAVAGPEMQVKLLQSLGLKSTLITDGSTPINLFNTAFGLLGMGPEGQPLGRRVASGPSPGEGISPQSAQAPQAPGDNHVVPVLR

SEQ ID NO: 4676 - protein, 893 aa, Homo sapiens; identical to SEQ ID NO: 4675

SEQ ID NO: 4677 - protein, 802 aa, Homo sapiens
MAATRAGPRAREIFTSLEYGPVPESHACALAWLDTQDRCLGHYVNGKWLKPEHRNSVPCQDPITGENLASCLQAQAEDVAAAVEAARMAFKGWSAHPGVVRAQHLTRLAEVIQKHQRLLWTLESLVTGRAVREVRDGDVQLAQQLLHYHAIQASTQEEALAGWEPMGVIGLILPPTFSFLEMMWRICPALAVGCTVVALVPPASPAPLLLAQLAGELGPFPGILNVVSGPASLVPILASQPGIRKVAFCGAPEEGRALRRSLAGECAELGLALGTESLLLLTDTADVDSAVEGVVDAAWSDRGPGGLRLLIQESVWDEAMRRLQERMGRLRSGRGLDGAVDMGARGAAACDLVQRFVREAQSQGAQVFQAGDVPSERPFYPPTLVSNLPPASPCAQVEVPWPVVVASPFRTAKEALLVANGTPRGGSASVWSERLGQALELGYGLQVGTVWINAHGLRDPSVPTGGCKESGCSWHGGPDGLYEYLRPSGTPARLSCLSKNLNYDTFGLAVPSTLPAGPEIGPSPAPPYGLFVGGRFQAPGARSSRPIRDSSGNLHGYVAEGGAKDIRGAVEAAHQAFPGWAGQSPGARAALLWALAAALERRKSTLASRLERQGAELKAAEAEVELSARRLRAWGARVQAQGHTLQVAGLRGPVLRLREPLGVLAVVCPDEWPLLAFVSLLAPALAYGNTVVMVPSAACPLLALEVCQDMATVFPAGLANVVTGDRDHLTRCLALHQDVQAMWYFGSAQGSQFVEWASAGNLKPVWASRGCPRAWDQEAEGAGPELGLRVARTKALWLPMGD

SEQ ID NO: 4678 - protein, 139 aa, Homo sapiens
MEAVVFVFSLLDCCALIFLSVYFIITLSDLECDYINARSCCSKLNKWVIPELIGHTIVTVLLLMSLHWFIFLLNLPVATWNIYRYIMVPSGNMGVFDPTEIHNRGQLKSHMKEAMIKLGFHLLCFFMYLYSMILALIND

SEQ ID NO: 4679 - protein, 260 aa, Homo sapiens
MEKCEAAAKDIRGETLNHHVNARHLDLASLKSIREFAAKIIEEEERVDILINNAGVMRCPHWTTEDGFEMQFGVNHLGHFLLTNLLLDKLKASAPSRIINLSSLAHVAGHIDFDDLNWQTRKYNTKAAYCQSKLAIVLFTKELSRRLQGSGVTVNALHPGVARTELGRHTGIHGSTFSSTTLGPIFWLLVKSPELAAQPSTYLAVAEELADVSGKYFDGLKQKAPAPEAEDEEVARRLWAESARLVGLEAPSVREQPLPR

SEQ ID NO: 4680 - protein, 211 aa, Homo sapiens
MQSAMFLAVQHDCRPMDKSAGSGHKSEEKREKMKRTLLKDWKTRLSYFLQNSSTPGKPKTGKKSKQQAFIKPSPEEAQLWSEAFDELLASKYGLAAFRAFLKSEFCEENIEFWLACEDFKKTKSPQKLSSKARKIYTDFIEKEAPKEINIDFQTKTLIAQNIQEATSGCFTTAQKRVYSLMENNSYPRFLESEFYQDLCKKPQITTEPHAT

SEQ ID NO: 4681 - protein, 92 aa, Homo sapiens [sequence omitted]

SEQ ID NO: 4682 - protein, 77 aa, Homo sapiens
MSVAFVPDWLRGKAEVNQETIQRLLEENDQLIRCIVEYQNKGRGNECVQYQHVLHRNLIYLATIADASPTSTSKAME

SEQ ID NO: 4683 - protein, 3128 aa, Homo sapiens
MTSGEKYTVCLRPRTAGEVAARGGPLRPTTLSIITGEVERQGKILILLPAQACAHLLSMDTTFLGSRNYVETWNRSAAAHRPDAGVPASPAPSDRGWVAEPQAAGGPRTPPLHRAAPAPGSGSFRASALPAAPCPQGSASPGGGGPGADPPAAAMWDPRAARVPPRDLAVLLCNKSNAFFSLGKWNEAFVAAKECLQWDPTYVKGYYRAGYSLLRLHQPYEAARMFFEGLRLVQRSQDQAPVADFLVGVFTTMSTFSVFSHQSFLLLSAKKDRLPRNIHVPELSLKSLFEKYVFIGLYEKMEQVPKLVQWLISIGASVETIGPYPLHALMRLCIQARENHLFRWLMDHKPEWKGRINQKDGDGCTVLHVVAAHSPGYLVKRQTEDVQMLLRFGADPTLLDRQSRSVVDVLKRNKNFKAIEKINSHLEKLATCSKDLSVLGLFESAYIRPLNPYLSGPPVGSQLLSAVLSTRTVPVFSICRHRQVMKLVQNQGRVEGKEAPLLDERSSKSHCTACEYVEGFSNGDGPTSENDIFRKVLEQLVKYMNSGNRLLHKNFLKQEVVQRFLRLLSTLQEIPPDLVCDINQDCATTVFKFLLEKQRWPEVLLLLTRKVSGEPPLGDCLIKDCNFSDLDICTIIPHLSTWDQRKKQLLGCLIDSGALPDGLQESQERPVVTCLKHEDFELAFLLLTKGADPRAISLTEGDTPLHAALHIFLEIKADIGFSFLSHLLDLFWSNPTEFDYLNPNVQDSNGNTLMHILFQKGMLKRVKKLLDLLVKFDINFNLKNKEGKDARHRIKKNDSLLLAWNKALMENRRRSRQDSAAHLGKLSKSTAPGHTSQLKSQGSFKSVPCGATARTLPEGSAVPDSWETLPGTQVTRKEPGALRPCSLRDCLMQDITVLIQQVEVDPSFPEDCLQSSEPLEAGAGKEGKKDDKPTLGAGAPDCSEVGEGHAQVGLGALQLVPDDNRGKEGNDDQDDWSTQEIEACLQDFDNMTWEIECTSEMLKKLSSKVMTKVIKKKIILAIQQLGNGEWTQGLQKRLKHLKGSIQLFEAKLDKGARMLWELAIDFSPRCSENPEKIIATEQNTCAMEKSGRIYTEIIRIWDIVLDHCKLADSIKAICNAYNRGLSCVLRKKLKGINKGQVSANMKIQKRIPRCYVEDTEAEKGREHVNPEYFPPASAVETEYNIMKFHSFSTNMAFNILNDTTATVEYPFRVGELEYAVIDLNPRPLEPIILIGRSGTGKTTCCLYRLWKKFHVYWEKAEQAGSPLLAKQVWLKRRLEVEPGKESPGGEEEEEEEDEEEEDSIEVETVESIDEQEYEACAGGAGVEPAGDGQAAEVCAPEHPHQLEHLHQIFVTKNHVLCQEVQRNFIELSKSTKATSHYKPLDPNIHKLQDLRDENFPLFVTSKQLLLLLDASLPKPFFLRNEDGSLKRTIIGWSAQEESTIPSWQEDEEEAEVDGDYSEEDKAVEMRTGDSDPRVYVTFEVFKNEIWPKMTKGRTAYNPALIWKEIKSFLKGSFEALSCPHGRLTEEVYKKLGRKRCPNFKEDRSEIYSLFSLYQQIRSQKGYFDEEDVLYNISRRLSKLRVLPWSIHELYGDEIQDFTQAELALLMKCINDPNSMFLTGDTAQSIMKGVAFRFSDLRSLFHYASRNTIDKQCAVRKPKKIHQLYQNYRSHSGILNLASGVVDLLQFYFPESFDRLPRDSGLFDGPKPTVLESCSVSDLAILLRGNKRKTQPIEFGAHQVILVANETAKEKIPEELGLALVLTIYEAKGLEFDDVLLYNFFTDSEAYKEWKIISSFTPTSTDSREENRPLVEVPLDKPGSSQGRSLMVNPEMYKLLNGELKQLYTAITRARVNLWIFDENREKRAPAFKYFIRRDFVQVVKTDENKDFDDSMFVKTSTPAEWIAQGDYYAKHQCWKVAAKCYQKGGAFEKEKLALAHDTALSMKSKKVSPKEKQLEYLELAKTYLECKEPTLSLKCLSYAKEFQLSAQLCERLGKIRDAAYFYKRSQCYKDAFRCFEQIQEFDLALKMYCQEELFEEAAIAVEKYEEMLKTKTLPISKLSYSASQFYLEAAAKYLSANKMKEMMAVLSKLDIEDQLVFLKSRKRLAEAADLLNREGRREEAALLMKQHGCLLEAARLTADKDFQASCLLGAARLNVARDSDIEHTKDILREALDICYQTGQLSGIAEAHFLQGVILRDFQKLRDAFFKFDTLNHSAGVVEALYEAASQCEAEPEKILGLAPGGLEILLSLVRALKRVTNNAEKEMVKSCFEFFGISQVDAKYCQIAQNDPGPILRIIFDLDLNLREKKTKDHFLIMTDQVKLALNKHLLGRLCQITRSLLGKTYRGVCMRFIVGLKCEDENCEHFHRPLRRCEAKCLVQSKMNLVAINGLLLEAKKVFPKILAEELKEIDYILSTDMYGLCKSILDVLFPKHFHQRVLSENPMACKEILKPNYKSFRFYRFALKEYIHFLFENESARNRRESTDLWLSAMQAFLLSSNYPEEFEKLLHQEEDNYNRELKALESEKDERGRGRGSRIKGIEGKFGMLAPNRDDENMDKTHLCFIRLLENCIDQFYVYRNPEDYKRLFFRFMNVLIKRCKEPLIPSIGNTVALLEFQFIHCGVVLARLWKNVILCLPKSYIALLHYWEFLFSKKDKELGDVFSIIQEYKPKDVTRAIQDFRFHLSYLAKVLCGYENVNFNVLLDAFSEIDYVVSGEAERTLVLCLVMLVNAEEILQPYCKPLLYRHFREIESRLQLMSMDCPGQVPERLLKVVKRVLVAVNVKSVAEALQDLLFERDEEYLMDCDWRWDPVHTKGSIVRGLYYEEVRLNRLLCLDPVDYFAEPECEFGQDEMDELALEDRDHVLATILSQKQRKASIQRKLRRACLVVSLCISWRRRVGTQMERVREEAREPRAGNFKKADVDRTQCDLCGVKFTRGPENYFSPSKAFEGAASEVAVLSRAELEREECQERNSESYEQHIHLEHHQRQQVAYQKYSEFFHEKVDPAIDEGKLVVQDIEQSVWIHSHVGSKEHSHMLQKVQEHIKRVSDMVEDLYRRKAWAGAEEAMTRLVNILILSVRDARDWLMKTETRLKKEGIVQEDDYENEVEDFGELRPRRRSRKCGKQRKY

SEQ ID NO: 4684 - protein, 3086 aa, Homo sapiens
MTSGEKYTVCLRPRTAGEVAARGGPLRPTTLSIITGEVERQGKILILLPAQACAHLLSMDTTFLGSRNYVETWNRSAAAHRPDAGVPASPAPSDRGWVAEPQAAGGPRTPPLHRAAPAPGSGSFRASALPAAPCPQGSASPGGGGPGADPPAAAMWDPRAARVPPRDLAVLLCNKSNAFFSLGKWNEAFVAAKECLQWDPTYVKGYYRAGYSLLRLHQPYEAARMFFEGLRLVQRSQDQAPVADFLVGVFTTMSTFSVFSHQSFLLLSAKKDRLPRNIHVPELSLKSLFEKYVFIGLYEKMEQVPKLVQWLISIGASVETIGPYPLHALMRLCIQARENHLFRWLMDHKPEWKGRINQKDGDGCTVLHVVAAHSPGYLVKRQTEDVQMLLRFGADPTLLDRQSRSVVDVLKRNKNFKAIEKINSHLEKLATCSKDLSVLGLFESAYIRPLNPYLSGPPVGSQLLSAVLSTRTVPVFRFSNGDGPTSENDIFRKVLEQLVKYMNSGNRLLHKNFLKQEVVQRFLRLLSTLQEIPPDLVCDINQDCATTVFKFLLEKQRWPEVLLLLTRKVSGEPPLGDCLIKDCNFSDLDICTIIPHLSTWDQRKKQLLGCLIDSGALPDGLQESQERPVVTCLKHEDFELAFLLLTKGADPRAISLTEGDTPLHAALHIFLEIKADIGFSFLSHLLDLFWSNPTEFDYLNPNVQDSNGNTLMHILFQKGMLKRVKKLLDLLVKFDINFNLKNKEGKDARHRIKKNDSLLLAWNKALMENRRRSRQDSAAHLGKLSKSTAPGHTSQLKSQGSFKSVPCGATARTLPEGSAVPDSWETLPGTQVTRKEPGALRPCSLRDCLMQDITVLIQQVEVDPSFPEDCLQSSEPLEAGAGKEGKKDDKPTLGAGAPDCSEVGEGHAQVGLGALQLVPDDNRGKEGNDDQDDWSTQEIEACLQDFDNMTWEIECTSEMLKKLSSKVMTKVIKKKIILAIQQLGNGEWTQGLQKRLKHLKGSIQLFEAKLDKGARMLWELAIDFSPRCSENPEKIIATEQNTCAMEKSGRIYTEIIRIWDIVLDHCKLADSIKAICNAYNRGLSCVLRKKLKGINKGQVSANMKIQKRIPRCYVEDTEAEKGREHVNPEYFPPASAVETEYNIMKFHSFSTNMAFNILNDTTATVEYPFRVGELEYAVIDLNPRPLEPIILIGRSGTGKTTCCLYRLWKKFHVYWEKAEQAGSPLLAKQVWLKRRLEVEPGKESPGGEEEEEEEDEEEEDSIEVETVESIDEQEYEACAGGAGVEPAGDGQAAEVCAPEHPHQLEHLHQIFVTKNHVLCQEVQRNFIELSKSTKATSHYKPLDPNIHKLQDLRDENFPLFVTSKQLLLLLDASLPKPFFLRNEDGSLKRTIIGWSAQEESTIPSWQEDEEEAEVDGDYSEEDKAVEMRTGDSDPRVYVTFEVFKNEIWPKMTKGRTAYNPALIWKEIKSFLKGSFEALSCPHGRLTEEVYKKLGRKRCPNFKEDRSEIYSLFSLYQQIRSQKGYFDEEDVLYNISRRLSKLRVLPWSIHELYGDEIQDFTQAELALLMKCINDPNSMFLTGDTAQSIMKGVAFRFSDLRSLFHYASRNTIDKQCAVRKPKKIHQLYQNYRSHSGILNLASGVVDLLQFYFPESFDRLPRDSGLFDGPKPTVLESCSVSDLAILLRGNKRKTQPIEFGAHQVILVANETAKEKIPEELGLALVLTIYEAKGLEFDDVLLYNFFTDSEAYKEWKIISSFTPTSTDSREENRPLVEVPLDKPGSSQGRSLMVNPEMYKLLNGELKQLYTAITRARVNLWIFDENREKRAPAFKYFIRRDFVQVVKTDENKDFDDSMFVKTSTPAEWIAQGDYYAKHQCWKVAAKCYQKGGAFEKEKLALAHDTALSMKSKKVSPKEKQLEYLELAKTYLECKEPTLSLKCLSYAKEFQLSAQLCERLGKIRDAAYFYKRSQCYKDAFRCFEQIQEFDLALKMYCQEELFEEAAIAVEKYEEMLKTKTLPISKLSYSASQFYLEAAAKYLSANKMKEMMAVLSKLDIEDQLVFLKSRKRLAEAADLLNREGRREEAALLMKQHGCLLEAARLTADKDFQASCLLGAARLNVARDSDIEHTKDILREALDICYQTGQLSGIAEAHFLQGVILRDFQKLRDAFFKFDTLNHSAGVVEALYEAASQCEAEPEKILGLAPGGLEILLSLVRALKRVTNNAEKEMVKSCFEFFGISQVDAKYCQIAQNDPGPILRIIFDLDLNLREKKTKDHFLIMTDQVKLALNKHLLGRLCQITRSLLGKTYRGVCMRFIVGLKCEDENCEHFHRPLRRCEAKCLVQSKMNLVAINGLLLEAKKVFPKILAEELKEIDYILSTDMYGLCKSILDVLFPKHFHQRVLSENPMACKEILKPNYKSFRFYRFALKEYIHFLFENESARNRRESTDLWLSAMQAFLLSSNYPEEFEKLLHQEEDNYNRELKALESEKDERGRGRGSRIKGIEGKFGMLAPNRDDENMDKTHLCFIRLLENCIDQFYVYRNPEDYKRLFFRFMNVLIKRCKEPLIPSIGNTVALLEFQFIHCGVVLARLWKNVILCLPKSYIALLHYWEFLFSKKDKELGDVFSIIQEYKPKDVTRAIQDFRFHLSYLAKVLCGYENVNFNVLLDAFSEIDYVVSGEAERTLVLCLVMLVNAEEILQPYCKPLLYRHFREIESRLQLMSMDCPGQVPERLLKVVKRVLVAVNVKSVAEALQDLLFERDEEYLMDCDWRWDPVHTKGSIVRGLYYEEVRLNRLLCLDPVDYFAEPECEFGQDEMDELALEDRDHVLATILSQKQRKASIQRKLRRACLVVSLCISWRRRVGTQMERVREEAREPRAGNFKKADVDRTQCDLCGVKFTRGPENYFSPSKAFEGAASEVAVLSRAELEREECQERNSESYEQHIHLEHHQRQQVAYQKYSEFFHEKVDPAIDEGKLVVQDIEQSVWIHSHVGSKEHSHMLQKVQEHIKRVSDMVEDLYRRKAWAGAEEAMTRLVNILILSVRDARDWLMKTETRLKKEGIVQEDDYENEVEDFGELRPRRRSRKCGKQRKY

SEQ ID NO: 4685 - protein, 357 aa, Homo sapiens
MARENGESSSSWKKQAEDIKKIFEFKETLGTGAFSEVVLAEEKATGKLFAVKCIPKKALKGKESSIENEIAVLRKIKHENIVALEDIYESPNHLYLVMQLVSGGELFDRIVEKGFYTEKDASTLIRQVLDAVYYLHRMGIVHRDLKPENLLYYSQDEESKIMISDFGLSKMEGKGDVMSTACGTPGYVAPEVLAQKPYSKAVDCWSIGVIAYILLCGYPPFYDENDSKLFEQILKAEYEFDSPYWDDISDSAKDFIRNLMEKDPNKRYTCEQAARHPWIAGDTALNKNIHESVSAQIRKNFAKSKWRQAFNATAVVRHMRKLHLGSSLDSSNASVSSSLSLASQKDCAYVAKPESLS

SEQ ID NO: 4686 - protein, 385 aa, Homo sapiens
MARENGESSSSWKKQAEDIKKIFEFKETLGTGAFSEVVLAEEKATGKLFAVKCIPKKALKGKESSIENEIAVLRKIKHENIVALEDIYESPNHLYLVMQLVSGGELFDRIVEKGFYTEKDASTLIRQVLDAVYYLHRMGIVHRDLKPENLLYYSQDEESKIMISDFGLSKMEGKGDVMSTACGTPGYVAPEVLAQKPYSKAVDCWSIGVIAYILLCGYPPFYDENDSKLFEQILKAEYEFDSPYWDDISDSAKDFIRNLMEKDPNKRYTCEQAARHPWIAGDTALNKNIHESVSAQIRKNFAKSKWRQAFNATAVVRHMRKLHLGSSLDSSNASVSSSLSLASQKDCLAPSTLCSFISSSSGVSGVGAERRPRPTTVTAVHSGSK

SEQ ID NO: 4687 - protein, 357 aa, Homo sapiens
MEVLRPQLIRIDGRNYRKNPVQEQTYQHEEDEEDFYQGSMECADEPCDAYEVEQTPQGFRSTLRAPSLLYKHIVGKRGDTRKKIEMETKTSISIPKPGQDGEIVITGQHRNGVISARTRIDVLLDTFRRKQPFTHFLAFFLNEVEVQEGFLRFQEEVLAKCSMDHGVDSSIFQNPKKLHLTIGMLVLLSEEEIQQTCEMLQQCKEEFINDISGGKPLEVEMAGIEYMNDDPGMVDVLYAKVHMKDGSNRLQELVDRVLERFQASGLIVKEWNSVKLHATVMNTLFRKDPNAEGRYNLYTAEGKYIFKERESFDGRNILKLFENFYFGSLKLNSIHISQRFTVDSFGNYASCGQIDFS

SEQ ID NO: 4688 - protein, 364 aa, Homo sapiens
MPRGRCRQQGPRIPIWAAANYANAHPWQQMDKASPGVAYTPLVDPWIERPCCGDTVCVRTTMEQKSTASGTCGGKPAERGPLAGHMPSSRPHRVDFCWVPGSDPGTFDGSPWLLDRFLAQLGDYMSFHFEHYQDNISRVCEILRRLTGRAQAWAAPYLDGDLPLPDDYELFCQDLKEVVQDPNSFAEYHAVVTCPLPLASSQLPVVPQLPVVRQYLARFLEGLALDMGTAPRSLPAAMATPAVSGSNSVSRSALFEQQLTKESTPGPKEPPVLPSSTCSSKPGPVEPASSQPEEAAPTPVPRLSESANPPAQRPDPAHPGGPKPQKTEEEVLETEGDQEVSLGTPQEVVEAPETPGEPPLSPGF

SEQ ID NO: 4689 - protein, 847 aa, Homo sapiens
MEPWKQCAQWLIHCKVLPTNHRVTWDSAQVFDLAQTLRDGVLLCQLLNNLRAHSINLKEINLRPQMSQFLCLKNIRTFLTACCETFGMRKSELFEAFDLFDVRDFGKVIETLSRLSRTPIALATGIRPFPTEESINDEDIYKGLPDLIDETLVEDEEDLYDCVYGEDEGGEVYEDLMKAEEAHQPKCPENDIRSCCLAEIKQTEEKYTETLESIEKYFMAPLKRFLTAAEFDSVFINIPELVKLHRNLMQEIHDSIVNKNDQNLYQVFINYKERLVIYGQYCSGVESAISSLDYISKSKEDVKLKLEECSKRANNGKFTLRDLLVVPMQRVLKYHLLLQELVKHTTDPTEKANLKLALDAMKDLAQYVNEVKRDNETLREIKQFQLSIENLNQPVLLFGRPQGDGEIRITTLDKHTKQERHIFLFDLAVIVCKRKGDNYEMKEIIDLQQYKIANNPTTDKENKKWSYGFYLIHTQGQNGLEFYCKTKDLKKKWLEQFEMALSNIRPDYADSNFHDFKMHTFTRVTSCKVCQMLLRGTFYQGYLCFKCGARAHKECLGRVDNCGRVNSGEQGTLKLPEKRTNGLRRTPKQVDPGLPKMQVIRNYSGTPPPALHEGPPLQLQAGDTVELLKGDAHSLFWQGRNLASGEVGFFPSDAVKPCPCVPKPVDYSCQPWYAGAMERLQAETELINRVNSTYLVRHRTKESGEYAISIKYNNEAKHIKILTRDGFFHIAENRKFKSLMELVEYYKHHSLKEGFRTLDTTLQFPYKEPEHSAGQRGNRAGNSLLSPKVLGIAIARYDFCARDMRELSLLKGDVVKIYTKMSANGWWRGEVNGRVGWFPSTYVEEDE

SEQ ID NO: 4690 - protein, 707 aa, Homo sapiens
MSGSRQAGSGSAGTSPGSSAASSVTSASSSLSSSPSPPSVAVSAAALVSGGVAQAAGSGGLGGPVRPVLVAPAVSGSGGGAVSTGLSRHSCAARPSAGVGGSSSSLGSGSRKRPLLAPLCNGLINSYEDKSNDFVCPICFDMIEEAYMTKCGHSFCYKCIHQSLEDNNRCPKCNYVVDNIDHLYPNFLVNELILKQKQRFEEKRFKLDHSNGHRWQIFQDWLGTDQDNLDLANVNLMLELLVQKKKQLEAESHAAQLQILMEFLKVARRNKREEMSGLYSPVSEDSTVPQFEAPSPSHSSIIDSTEYSQPPGFSGSSQTKKQPWYNSTLASRRKRLTAHFEDLEQCYFSTRMSRISDDSRTASQLDEFQECLSKFTRYNSVRPLATLSYASDLYNGSSIVSSIEFDRDCDYFAIAGVTKKIKVYEYDTVIQDAVDIHYPENEMTCNSKISCISWSSYHKNLLASSDYEGTVILWDGFTGQRSKVYQEHEKRCWSVDFNLMDPKLLASGSDDAKVKLWSTNLDNSVASIEAKANVCCVKFSPSSRYHLAFGCADHCVHYYDLRNTKQPIMVFKGHRKAVSYAKFVSGEEIVSASTDSQLKLWNVGKPYCLRSFKGHINEKNFVGLASNGDYIACGSENNSLYLYYKGLSKTLLTFKFDTVKSVLDKDRKEDDTNEFVSAVCWRALPDGESNVLIAANSQGTIKVLELV

SEQ ID NO: 4691 - protein, 731 aa, Homo sapiens
MSGSRQAGSGSAGTSPGSSAASSVTSASSSLSSSPSPPSVAVSAAALVSGGVAQAAGSGGLGGPVRPVLVAPAVSGSGGGAVSTGLSRHSCAARPSAGVGGSSSSLGSGSRKRPLLAPLCNGLINSYEDKSNDFVCPICFDMIEEAYMTKCGHSFCYKCIHQSLEDNNRCPKCNYVVDNIDHLYPNFLVNELILKQKQRFEEKRFKLDHSVSSTNGHRWQIFQDWLGTDQDNLDLANVNLMLELLVQKKKQLEAESHAAQLQILMEFLKVARRNKREQLEQIQKELSVLEEDIKRVEEMSGLYSPVSEDSTVPQFEAPSPSHSSIIDSTEYSQPPGFSGSSQTKKQPWYNSTLASRRKRLTAHFEDLEQCYFSTRMSRISDDSRTASQLDEFQECLSKFTRYNSVRPLATLSYASDLYNGSSIVSSIEFDRDCDYFAIAGVTKKIKVYEYDTVIQDAVDIHYPENEMTCNSKISCISWSSYHKNLLASSDYEGTVILWDGFTGQRSKVYQEHEKRCWSVDFNLMDPKLLASGSDDAKVKLWSTNLDNSVASIEAKANVCCVKFSPSSRYHLAFGCADHCVHYYDLRNTKQPIMVFKGHRKAVSYAKFVSGEEIVSASTDSQLKLWNVGKPYCLRSFKGHINEKNFVGLASNGDYIACGSENNSLYLYYKGLSKTLLTFKFDTVKSVLDKDRKEDDTNEFVSAVCWRALPDGESNVLIAANSQGTIKVLELV

SEQ ID NO: 4692 - protein, 384 aa, Homo sapiens
MNATGTPVAPESCQQLAAGGHSRLIVLHYNHSGRLAGRGGPEDGGLGALRGLSVAASCLVVLENLLVLAAITSHMRSRRWVYYCLVNITLSDLLTGAAYLANVLLSGARTFRLAPAQWFLREGLLFTALAASTFSLLFTAGERFATMVRPVAESGATKTSRVYGFIGLCWLLAALLGMLPLLGWNCLCAFDRCSSLLPLYSKRYILFCLVIFAGVLATIMGLYGAIFRLVQASGQKAPRPAARRKARRLLKTVLMILLAFLVCWGPLFGLLLADVFGSNLWAQEYLRGMDWILALAVLNSAVNPIIYSFRSREVCRAVLSFLCCGCLRLGMRGPGDCLARAVEAHSGASTTDSSLRPRDSFRGSRSLSFRMREPLSSISSVRSI

SEQ ID NO: 4693 - protein, 337 aa, Homo sapiens
MAAPRDNVTLLFKLYCLAVMTLMAAVYTIALRYTRTSDKELYFSTTAVCITEVIKLLLSVGILAKETGSLGRFKASLRENVLGSPKELLKLSVPSLVYAVQNNMAFLALSNLDAAVYQVTYQLKIPCTALCTVLMLNRTLSKLQWVSVFMLCAGVTLVQWKPAQATKVVVEQNPLLGFGAIAIAVLCSGFAGVYFEKVLKSSDTSLWVRNIQMYLSGIIVTLAGVYLSDGAEIKEKGFFYGYTYYVWFVIFLASVGGLYTSVVVKYTDNIMKGFSAAAAIVLSTIASVMLFGLQITLTFALGTLLVCVSIYLYGLPRQDTTSIQQGETASKERVIGV

SEQ ID NO: 4694 - protein, 801 aa, Homo sapiens
MHHRMNEMNLSPVGMEQLTSSSVSNALPVSGSHLGLAASPTHSAIPAPGLPVAIPNLGPSLSSLPSALSLMLPMGIGDRGVMCGLPERNYTLPPPPYPHLESSYFRTILPGILSYLADRPPPQYIHPNSINVDGNTALSITNNPSALDPYQSNGNVGLEPGIVSIDSRSVNTHGAQSLHPSDGHEVALDTAITMENVSRVTSPISTDGMAEELTMDGVAGEHSQIPNGSRSHEPLSVDSVSNNLAADAVGHGGVIPMHGNGLELPVVMETDHIASRVNGMSDSALSDSIHTVAMSTNSVSVALSTSHNLASLESVSLHEVGLSLEPVAVSSITQEVAMGTGHVDVSSDSLSFVSPSLQMEDSNSNKENMATLFTIWCTLCDRAYPSDCPEHGPVTFVPDTPIESRARLSLPKQLVLRQSIVGAEVGVWTGETIPVRTCFGPLIGQQSHSMEVAEWTDKAVNHIWKIYHNGVLEFCIITTDENECNWMMFVRKARNREEQNLVAYPHDGKIFFCTSQDIPPENELLFYYSRDYAQQIGVPEHPDVHLCNCGKECNSYTEFKAHLTSHIHNHLPTQGHSGSHGPSHSKERKWKCSMCPQAFISPSKLHVHFMGHMGMKPHKCDFCSKAFSDPSNLRTHLKIHTGQKNYRCTLCDKSFTQKAHLESHMVIHTGEKNLKCDYCDKLFMRRQDLKQHVLIHTQERQIKCPKCDKLFLRTNHLKKHLNSHEGKRDYVCEKCTKAYLTKYHLTRHLKTCKGPTSSSSAPEEEEEDDSEEEDLADSVGTEDCRINSAVYSADESLSAHK

SEQ ID NO: 4695 - protein, 499 aa, Homo sapiens
MAQGLVTFRDVAIEFSLEEWKCLEPAQRDLYREVTLENFGHLASLGLSISKPDVVSLLEQGKEPWMIANDVTGPWCPDLESRCEKFLQKDIFEIGAFNWEIMESLKCSDLEGSDFRADWECEGQFERQVNEECYFKQVNVTYGHMPVFQHHTSHTVRQSRETGEKLMECHECGKAFSRGSHLIQHQKTHTGEKPFGCKECGKAFSRASHLVQHQRIHTGEKPYDCKDCGKAFGRTSELILHQRLHTGVKPYECKECGKTFRQHSQLILHQRTHTGEKPYVCKDCGKAFIRGSQLTVHRRIHTGARPYECKECGKAFRQHSQLTVHQRIHTGEKPYECKECGKGFIHSSEVTRHQRIHSGEKPYECKECGKAFRQHAQLTRHQRVHTGDRPYECKDCGKAFSRSSYLIQHQRIHTGDKPYECKECGKAFIRVSQLTHHQRIHTCEKPYECRECGMAFIRSSQLTEHQRIHPGIKPYECRECGQAFILGSQLIEHYRIHTG

SEQ ID NO: 4696 - protein, 228 aa, Homo sapiens
MSVSEIFVELQGFLAAEQDIREEIRKVVQSLEQTAREILTLLQGVHQGAGFQDIPKRCLKAREHFGTVKTHLTSLKTKFPAEQYYRFHEHWRFVLQRLVFLAAFVVYLETETLVTREAVTEILGIEPDREKGFHLDVEDYLSGVLILASELSRLSVNSVTAGDYSRPLHISTFINELDSGFRLLNLKNDSLRKRYDGLKYDVKKVEEVVYDLSIRGFNKETAAACVEK

SEQ ID NO: 4697 - protein, 374 aa, Homo sapiens
MSGESMNFSDVFDSSEDYFVSVNTSYYSVDSEMLLCSLQEVRQFSRLFVPIAYSLICVFGLLGNILVVITFAFYKKARSMTDVYLLNMAIADILFVLTLPFWAVSHATGAWVFSNATCKLLKGIYAINFNCGMLLLTCISMDRYIAIVQATKSFRLRSRTLPRSKIICLVVWGLSVIISSSTFVFNQKYNTQGSDVCEPKYQTVSEPIRWKLLMLGLELLFGFFIPLMFMIFCYTFIVKTLVQAQNSKRHKAIRVIIAVVLVFLACQIPHNMVLLVTAANLGKMNRSCQSEKLIGYTKTVTEVLAFLHCCLNPVLYAFIGQKFRNYFLKILKDLWCVRRKYKSSGFSCAGRYSENISRQTSETADNDNASSFTM

SEQ ID NO: 4698 - protein, 374 aa, Homo sapiens; identical to SEQ ID NO: 4697

SEQ ID NO: 4699 - protein, 140 aa, Homo sapiens
MTSMTQSLREVIKAMTKARNFERVLGKITLVSAAPGKVICEMKVEEEHTNAIGTLHGGLTATLVDNISTMALLCTERGAPGVSVDMNITYMSPAKLGEDIVITAHVLKQGKTLAFTSVDLTNKATGKLIAQGRHTKHLGN

SEQ ID NO: 4700 - protein, 258 aa, Homo sapiens
MAETEERSLDNFFAKRDKKKKKERSNRAASAAGAAGSAGGSSGAAGAAGGGAGAGTRPGDGGTASAGAAGPGAATKAVTKDEDEWKELEQKEVDYSGLRVQAMQISSEKEEDDNEKRQDPGDNWEEGGGGGGGMEKSSGPWNKTAPVQAPPAPVIVTETPEPAMTSGVYRPPGARLTTTRKTPQGPPEIYSDTQFPSLQSTAKHVESRKDKEMEKSFEVVRHKNRGRDEVSKNQALKLQLDNQYAVLENQKSSHSQYN

SEQ ID NO: 4701 - protein, 796 aa, Homo sapiens
MLAPLRNAPGREGATSPSPPTDATGSLGEWDVDRNVKTEGWVSKERISKLHRLRMADILSQSETLASQDLSGDFKKPALPVSPAARSKAPASSSSNPEEVQKEGPTALQDSNSGEPDIPPPQPDCGDFRSLQEEQSRPTTAVSSPGGPARAPPYQEPPWGGPATAPYSLETLKGGTILGTRSLKGTSYCLFGRLSGCDVCLEHPSVSRYHAVLQHRASGPDGECDSNGPGFYLYDLGSTHGTFLNKTRIPPRTYCRVHVGHVVRFGGSTRLFILQGPEEDREAESELTVTQLKELRKQQQILLEKKMLREDSDEEEEMDTSERKINAGSQDDEMGCTWGMGEDAVEDDAEENPIVLEFQQEREAFYIKDPKKVLQGFFDREGEELEYEFDEQGHSTWLCRVRLPVDDSTGKQLVAEAIHSGKKKEAMIQCSLEACRILDTLGLLRQEAVSRKRKAKNWEDEDFYDSDDDTFLDRTGLIEKKRLNRMKKAGKIDEKPETFESLVAKLNDAERELSEISERLKASSQVLSESPSQDSLDAFMSEMKSGSTLDGVSRKKLHLRTFELRKEQQRLKGLIKIVKPAEIPELKKTETQTTGAENKAKKLTLPLFGAMKGGSKFKLKTGTVGKLPPKRPELPPTLMRMKDEPEVEEEEEEEEEEEKEKEEHEKKKLEDGSLSRPQPEIEPEAAVQEMRPPTDLTHFKETQTHENMSQLSEEEQNKDYQDCSKTTSLCAGPSASKNEYEKSRGELKKKKTPGPGKLPPTLSSKYPEDDPDYCVWVPPEGQSGDGRTHLNDKYGY

SEQ ID NO: 4702 - protein, 603 aa, Homo sapiens
MAASCPLPVTPDLPTLRAKLQGLLQFLRDALSISNAHTVDFYTESVWEELVDLPPETVLAALRKSASETEALPSETRPLVEAEWEAGMTDFPKIFCETSQKLVSVEAFALAAKYYSVQNLGICTPFEQLLVALRGNQNQRIGENQKAVEFMNMKKSHEVQAMSELISSIADYYGIKQVIDLGSGKGYLSSFLSLKYGLKVYGIDSSNTNTHGAEERNRKLKKHWKLCHAQSRLDVNGLALKMAKERKVKNKVKNKADTEEVFNNSPTNQEKMPTSAILPDFSGSVISNIRNQMETLHSQPHQEENLCFENSFSLINLLPINAVEPTSSQQIPNRETSEANKERRKMTSKSSESNIYSPLTSFITADSELHDIIKDLEDCLMVGLHTCGDLAPNTLRIFTSNSEIKGVCSVGCCYHLLSEEFENQHKERTQEKWGFPMCHYLKEERWCCGRNARMSACLALERVAAGQGLPTESLFYRAVLQDIIKDCYGITKCDRHVGKIYSKCSSFLDYVRRSLKKLGLDESKLPEKIIMNYYEKYKPRMNELEAFNMLKVVLAPCIETLILLDRLCYLKEQEDIAWSALVKLFDPVKSPRCYAVIALKKQQ

SEQ ID NO: 4703 - protein, 875 aa, Homo sapiens
MHDAFEPVPILEKLPLQIDCLAAWEEWLLVGTKQGHLLLYRIRKDVGCNRFEVTLEKSNKNFSKKIQQIHVVSQFKILVSLLENNIYVHDLLTFQQITTVSKAKGASLFTCDLQHTETGEEVLRMCVAVKKKLQLYFWKDREFHELQGDFSVPDVPKSMAWCENSICVGFKRDYYLIRVDGKGSIKELFPTGKQLEPLVAPLADGKVAVGQDDLTVVLNEEGICTQKCALNWTDIPVAMEHQPPYIIAVLPRYVEIRTFEPRLLVQSIELQRPRFITSGGSNIIYVASNHFVWRLIPVPMATQIQQLLQDKQFELALQLAEMKDDSDSEKQQQIHHIKNLYAFNLFCQKRFDESMQVFAKLGTDPTHVMGLYPDLLPTDYRKQLQYPNPLPVLSGAELEKAHLALIDYLTQKRSQLVKKLNDSDHQSSTSPLMEGTPTIKSKKKLLQIIDTTLLKCYLHTNVALVAPLLRLENNHCHIEESEHVLKKAHKYSELIILYEKKGLHEKALQVLVDQSKKANSPLKGHERTVQYLQHLGTENLHLIFSYSVWVLRDFPEDGLKIFTEDLPEVESLPRDRVLGFLIENFKGLAIPYLEHIIHVWEETGSRFHNCLIQLYCEKVQGLMKEYLLSFPAGKTPVPAGEEEGELGEYRQKLLMFLEISSYYDPGRLICDFPFDGLLEERALLLGRMGKHEQALFIYVHILKDTRMAEEYCHKHYDRNKDGNKDVYLSLLRMYLSPPSIHCLGPIKLELLEPKANLQAALQVLELHHSKLDTTKALNLLPANTQINDIRIFLEKVLEENAQKKRFNQVLKNLLHAEFLRVQEERILHQQVKCIITEEKVCMVCKKKIGNSAFARYPNGVVVHYFCSKEVNPADT

SEQ ID NO: 4704 - protein, 307 aa, Homo sapiens
MTSIKEQAAISRLLSFLQEWDNAGKVARSHILDKFIETNQGKTAPELEQEFSQGASLFLVRLTTSLRITYMTDSCLEKLLRSIGIFLSAVSSNRYLIEFLEVGGVLTLLEILGLEKIKEEAKKESVKLLQVIANSGRTYKELICESYGVRSIAEFLAKSKSEETQEEVQVLLDSLVHGNPKYQNQVYKGLIALLPCESPKAQQLSLQTLRTAQPIIGTTHPSIVDCVLKVLGTMHLEVQYEAIELIKDLVGYDVRQALLKGLVALLIPSVKEISKLQAKILSDPSVLQLTPSLPMFLQQAAAAKAIG

SEQ ID NO: 4705 - protein, 412 aa, Homo sapiens
MANVADTKLYDILGVPPGASENELKKAYRKLAKEYHPDKNPNAGDKFKEISFAYEVLSNPEKRELYDRYGEQGLREGSGGGGGMDDIFSHIFGGGLFGFMGNQSRSRNGRRRGEDMMHPLKVSLEDLYNGKTTKLQLSKNVLCSACSGQGGKSGAVQKCSACRGRGVRIMIRQLAPGMVQQMQSVCSDCNGEGEVINEKDRCKKCEGKKVIKEVKILEVHVDKGMKHGQRITFTGEADQAPGVEPGDIVLLLQEKEHEVFQRDGNDLHMTYKIGLVEALCGFQFTFKHLDGRQIVVKYPPGKVIEPGCVRVVRGEGMPQYRNPFEKGDLYIKFDVQFPENNWINPDKLSELEDLLPSRPEVPNIIGETEEVELQEFDSTRGSGGGQRREAYNDSSDEESSSHHGPGVQCAHQ

SEQ ID NO: 4706 - protein, 372 aa, Homo sapiens
MTFQFNFTIEDHLENELTPIRDGALTLDSSKELSVSESQKGEERDRKCSAEQFDLPQDHLWEHKSMENAAPSQDTDSPLSAASSSRNLEPHGKQPSLRAAKEHAMPKDLKKMLENKVIETLPGFQHVKLSVVKTILLKENFPGENIVSKSFSSHSDLITGVYEGGLKIWECTFDLLAYFTKAKVKFAGKKVLDLGCGSGLLGITAFKGGSKEIHFQDYNSMVIDEVTLPNVVANSTLEDEENDVNEPDVKRCRKPKVTQLYKCRFFSGEWSEFCKLVLSSEKLFVKYDLILTSETIYNPDYYSNLHQTFLRLLSKNGRVLLASKAHYFGVGGGVHLFQKFVEERDVFKTRILKIIDEGLKRFIIEITFKFPG

SEQ ID NO: 4707 - protein, 633 aa, Homo sapiens
MPSCGACTCGAAAVRLITSSLASAQRGISGGRIHMSVLGRLGTFETQILQRAPLRSFTETPAYFASKDGISKDGSGDGNKKSASEGSSKKSGSGNSGKGGNQLRCPKCGDLCTHVETFVSSTRFVKCEKCHHFFVVLSEADSKKSIIKEPESAAEAVKLAFQQKPPPPPKKIYNYLDKYVVGQSFAKKVLSVAVYNHYKRIYNNIPANLRQQAEVEKQTSLTPRELEIRRREDEYRFTKLLQIAGISPHGNALGASMQQQVNQQIPQEKRGGEVLDSSHDDIKLEKSNILLLGPTGSGKTLLAQTLAKCLDVPFAICDCTTLTQAGYVGEDIESVIAKLLQDANYNVEKAQQGIVFLDEVDKIGSVPGIHQLRDVGGEGVQQGLLKLLEGTIVNVPEKNSRKLRGETVQVDTTNILFVASGAFNGLDRIISRRKNEKYLGFGTPSNLGKGRRAAAAADLANRSGESNTHQDIEEKDRLLRHVEARDLIEFGMIPEFVGRLPVVVPLHSLDEKTLVQILTEPRNAVIPQYQALFSMDKCELNVTEDALKAIARLALERKTGARGLRSIMEKLLLEPMFEVPNSDIVCVEVDKEVVEGKKEPGYIRAPTKESSEEEYDSGVEEEGWPRQADAANS

SEQ ID NO: 4708 - protein, 212 aa, Homo sapiens
MRMTMEEMKNEAETTSMVSMPLYAVMYPVFNELERVNLSAAQTLRAAFIKAEKENPGLTQDIIMKILEKKSVEVNFTESLLRMAADDVEEYMIERPEPEFQDLNEKARALKQILSKIPDEINDRVRFLQTIKDIASAIKELLDTVNNVFKKYQYQNRRALEHQKKEFVKYSKSFSDTLKTYFKDGKAINVFVSANRLIHQTNLILQTFKTVA

SEQ ID NO: 4709 - protein, 212 aa, Homo sapiens; identical to SEQ ID NO: 4708

SEQ ID NO: 4710 - protein, 212 aa, Homo sapiens; identical to SEQ ID NO: 4708

SEQ ID NO: 4711 - protein, 1186 aa, Homo sapiens
MSKLKVIPEKSLTNNSRIVGLLAQLEKINAEPSESDTARYVTSKILHLAQSQEKTRREMTAKGSTGMEILLSTLENTKDLQTTLNILSILVELVSAGGGRRVSFLVTKGGSQILLQLLMNASKESPPHEDLMVQIHSILAKIGPKDKKFGVKARINGALNITLNLVKQNLQNHRLVLPCLQLLRVYSANSVNSVSLGKNGVVELMFKIIGPFSKKNSSLIKVALDTLAALLKSKTNARRAVDRGYVQVLLTIYVDWHRHDNRHRNMLIRKGILRSLKSVTNIKLGRKAFIDANGMKILYNTSQLPVIPVTGPVAQLYSLPPEVDDVVDESDDNDDIDVEAENETENEDDLDQNFKNDDIETDINKLKPQQEPGRTIEDLKMYEHLFPELVDDFQDYDLISKEPKPFVFEGKVRGPIVVPTAGEGTSGNSGNLRKVVMKENISSKGDEGEKKSTFMDLAKEDIKDNDRTLQQQPGDQNRTISSVHGLNNDIVKALDRITLQNIPSQTAPGFTAEMKKDCSLPLTVLTCAKACPHMATCGNVLFEGRTVQLGKLCCTGVGTEDDEDTESNSSVEQASVEVPDGPTLHDPDLYIEIVKNTKSVPEYSEVAYPDYFGHIPPPFKEPILERPYGVQRTKIAQDIERLIHQSDIIDRVVYDLDNPNYTIPEEGDILKFNSKFESGNLRKVIQIRKNEYDLILNSDINSNHYHQWFYFEVSGMRPGVAYRFNIINCEKSNSQFNYGMQPLMYSVQEALNARPWWIRMGTDICYYKNHFSRSSVAAGGQKGKSYYTITFTVNFPHKDDVCYFAYHYPYTYSTLQMHLQKLESAHNPQQIYFRKDVLCETLSGNSCPLVTITAMPESNYYEHICHFRNRPYVFLSARVHPGETNASWVMKGTLEYLMSNNPTAQSLRESYIFKIVPMLNPDGVINGNHRCSLSGEDLNRQWQSPSPDLHPTIYHAKGLLQYLAAVKRLPLVYCDYHGHSRKKNVFMYGCSIKETVWHTNDNATSCDVVEDTGYRTLPKILSHIAPAFCMSSCSFVVEKSKESTARVVVWREIGVQRSYTMESTLCGCDQGKYKGLQIGTRELEEMGAKFCVGLLRLKRLTSPLEYNLPSSLLDFENDLIESSCKVTSPTTYVLDEDEPRFLEEVDYSAESNDELDIELAENVGDYEPSAQEEVLSDSELSRTYLP

SEQ ID NO: 4712 - protein, 205 aa, Homo sapiens
MSKGRAEAAAGAAGILLRYLQEQNRPYSSQDVFGNLQREHGLGKAVVVKTLEQLAQQGKIKEKMYGKQKIYFADQDQFDMVSDADLQVLDGKIVALTAKVQSLQQSCRYMEAEMQKEIQELKKECAGYRERLKNIKAATNHVTPEEKEQVYRERQKYCKEWRKRKRMATELSDAILEGYPKSKKQFFEEVGIETDEDYNVTLPDP

SEQ ID NO: 4713 - protein, 217 aa, Homo sapiens
MSKGRAEAAAGAAGILLRYLQEQNRPYSSQDVFGNLQREHGLGKAVVVKTLEQLAQQGKIKEKMYGKQKIYFADQDQFDMVSDADLQVLDGKIVALTAKVQSLQQSCRYMEAELKELSSALTTPEMQKEIQELKKECAGYRERLKNIKAATNHVTPEEKEQVYRERQKYCKEWRKRKRMATELSDAILEGYPKSKKQFFEEVGIETDEDYNVTLPDP

SEQ ID NO: 4714 - protein, 475 aa, Homo sapiens
MPGISARGLSHEGRKQLAVNLTRVLALYRSILDAYIIEFFTDNLWDTLPCSWQEALDGLKPPQLATMLLGMPGEGEVVRYRSVWPLTLLALKSTACALAFTRMPGFQTPSEFLENPSQSSRLTAPFRKHVRPKKQHEIRRLGELVKKLSDFTGCTQVVDVGSGQGHLSRFMALGLGLMVKSIEGDQRLVERAQRLDQELLQALEKEEKRNPQVVQTSPRHSPHHVVRWVDPTALCEELLLPLENPCQGRARLLLTGLHACGDLSVALLRHFSCCPEVVALASVGCCYMKLSDPGGYPLSQWVAGLPGYELPYRLREGACHALEEYAERLQKAGPGLRTHCYRAALETVIRRARPELRRPGVQGIPRVHELKIEEYVQRGLQRVGLDPQLPLNLAALQAHLAQENRVVAFFSLALLLAPLVETLILLDRLLYLQEQLFHAELLPIFSPELSPRNLVLVATKMPLGQALSVLETEDS

SEQ ID NO: 4715 - protein, 1090 aa, Homo sapiens
MATLLSHPQQRPPFLRQAIKIRRRRVRDLQDPPPQMAPEIQPPSHHFSPEQRALLYEDALYTVLHRLGHPEPNHVTEASELLRYLQEAFHVEPEEHQQTLQRVRELEKPIFCLKATVKQAKGILGKDVSGFSDPYCLLGIEQGVGVPGGSPGSRHRQKAVVRHTIPEEETHRTQVITQTLNPVWDETFILEFEDITNASFHLDMWDLDTVESVRQKLGELTDLHGLRRIFKEARKDKGQDDFLGNVVLRLQDLRCREDQWYPLEPRTETYPDRGQCHLQFQLIHKRRATSASRSQPSYTVHLHLLQQLVSHEVTQHEAGSTSWDGSLSPQAATVLFLHATQKDLSDFHQSMAQWLAYSRLYQSLEFPSSCLLHPITSIEYQWIQGRLKAEQQEELAASFSSLLTYGLSLIRRFRSVFPLSVSDSPARLQSLLRVLVQMCKMKAFGELCPNTAPLPQLVTEALQTGTTEWFHLKQQHHQPMVQGIPEAGKALLGLVQDVIGDLHQCQRTWDKIFHNTLKIHLFSMAFRELQWLVAKRVQDHTTVVGDVVSPEMGESLFQLYISLKELCQLRMSSSERDGVLALDNFHRWFQPAIPSWLQKTYNEALARVQRAVQMDELVPLGELTKHSTSAVDLSTCFAQISHTARQLDWPDPEEAFMITVKFVEDTCRLALVYCSLIKARARELSSGQKDQGQAANMLCVVVNDMEQLRLVIGKLPAQLAWEALEQRVGAVLEQGQLQNTLHAQLQSALAGLGHEIRTGVRTLAEQLEVGIAKHIQKLVGVRESVLPEDAILPLMKFLEVELCYMNTNLVQENFSSLLTLLWTHTLTVLVEAAASQRSSSLASNRLKIALQNLEICFHAEGCGLPPKALHTATFQALQRDLELQAASSRELIRKYFCSRIQQQAETTSEELGAVTVKASYRASEQKLRVELLSASSLLPLDSNGSSDPFVQLTLEPRHEFPELAARETQKHKKDLHPLFDETFEFLVPAEPCRKAGACLLLTVLDYDTLGADDLEGEAFLPLREVPGLSGSEEPGEVPQTRLPLTYPAPNGDPILQLLEGRKGDREAQVFVRLRRHRAKQASQHALRPAP

SEQ ID NO: 4716 - protein, 90 aa, Homo sapiens
MACPLDQAIGLLVAIFHKYSGREGDKHTLSKKELKELIQKELTIGSKLQDAEIARLMEDLDRNKDQEVNFQEYVTFLGALALIYNEALKG

SEQ ID NO: 4717 - protein, 920 aa, Homo sapiens
MNSMNPMKPALPPAPHGDGSFAYESVPWQQSATQPAGSLSVVTTVWGVGNATQSQVLGNPMGPAGSPSGSSMMPGVAGGSSALTSPQCLGQQAFAEGGANKGYVQQGVYSRGGYPGAPGFTTGYAGGPGGLGLPSHAARPSTDFTQAAAAAAVAAAAATATATATATVAALQEKQSQELSQYGAMGAGQSFNSQFLQHGGPRGPSVPAGMNPTGIGGVMGPSGLSPLAMNPTRAAGMTPLYAGQRLPQHGYPGPPQAQPLPRQGVKRTYSEVYPGQQYLQGGQYAPSTAQFAPSPGQPPAPSPSYPGHRLPLQQGMTQSLSVPGPTGLHYKPTEQFNGQGASFNGGSVSYSQPGLSGPTRSIPGYPSSPLPGNPTPPMTPSSSVPYMSPNQEVKSPFLPDLKPNLNSLHSSPSGSGPCDELRLTFPVRDGVVLEPFRLQHNLAVSNHVFQLRDSVYKTLIMRPDLELQFKCYHHEDRQMNTNWPASVQVSVNATPLTIERGDNKTSHKPLYLKHVCQPGRNTIQITVTACCCSHLFVLQLVHRPSVRSVLQGLLKKRLLPAEHCITKIKRNFSSGTIPGTPGPNGEDGVEQTAIKVSLKCPITFRRIQLPARGHDCRHIQCFDLESYLQLNCERGTWRCPVCNKTALLEGLEVDQYMLGILIYIQNSDYEEITIDPTCSWKPVPVKPDMHIKEEPDGPALKRCRTVSPAHVLMPSVMEMIAALGPGAAPFAPLQPPSVPAPSDYPGQGSSFLGPGTFPESFPPTTPSTPTLAEFTPGPPPISYQSDIPSSLLTSEKSTACLPSQMAPAGHLDPTHNPGTPGLHTSNLGAPPGPQLHHSNPPPASRQSLGQASLGPTGELAFSPATGVMGPPSMSGAGEAPEPALDLLPELTNPDELLSYLGPPDLPTNNNDDLLSLFENN

SEQ ID NO: 4718 - protein, 894 aa, Homo sapiens
MNSMNPMKPALPPAPHGDGSFAYESVPWQQSATQPAGSLSVVTTVWGVGNATQSQVLGNPMGPAGSPSGSSMMPGVAGGSSALTSPQCLGQQAFAEGGANKGYVQQGVYSRGGYPGAPGFTTGYAGGPGGLGLPSHAARPSTDFTQAAAAAAVAAAAATATATATATVAALQEKQSQELSQYGAMGAGQSFNSQFLQHGGPRGPSVPAGMNPTGIGGVMGPSGLSPLAMNPTRAAGMTPLYAGQRLPQHGYPGPPQAQPLPRQGVKRTYSEVYPGQQYLQGGQYAPSTAQFAPSPGQPPAPSPSYPGHRLPLQQGMTQSLSVPGPTGLHYKPTRSIPGYPSSPLPGNPTPPMTPSSSVPYMSPNQEVKSPFLPDLKPNLNSLHSSPSGSGPCDELRLTFPVRDGVVLEPFRLQHNLAVSNHVFQLRDSVYKTLIMRPDLELQFKCYHHEDRQMNTNWPASVQVSVNATPLTIERGDNKTSHKPLYLKHVCQPGRNTIQITVTACCCSHLFVLQLVHRPSVRSVLQGLLKKRLLPAEHCITKIKRNFSSGTIPGTPGPNGEDGVEQTAIKVSLKCPITFRRIQLPARGHDCRHIQCFDLESYLQLNCERGTWRCPVCNKTALLEGLEVDQYMLGILIYIQNSDYEEITIDPTCSWKPVPVKPDMHIKEEPDGPALKRCRTVSPAHVLMPSVMEMIAALGPGAAPFAPLQPPSVPAPSDYPGQGSSFLGPGTFPESFPPTTPSTPTLAEFTPGPPPISYQSDIPSSLLTSEKSTACLPSQMAPAGHLDPTHNPGTPGLHTSNLGAPPGPQLHHSNPPPASRQSLGQASLGPTGELAFSPATGVMGPPSMSGAGEAPEPALDLLPELTNPDELLSYLGPPDLPTNNNDDLLSLFENN

SEQ ID NO: 4719 - protein, 802 aa, Homo sapiens
MPRIMIKGGVWRNTEDEILKAAVMKYGKNQWSRIASLLHRKSAKQCKARWYEWLDPSIKKTEWSREEEEKLLHLAKLMPTQWRTIAPIIGRTAAQCLEHYEFLLDKAAQRDNEEETTDDPRKLKPGEIDPNPETKPARPDPIDMDEDELEMLSEARARLANTQGKKAKRKAREKQLEEARRLAALQKRRELRAAGIEIQKKRKRKRGVDYNAEIPFEKKPALGFYDTSEENYQALDADFRKLRQQDLDGELRSEKEGRDRKKDKQHLKRKKESDLPSAILQTSGVSEFTKKRSKLVLPAPQISDAELQEVVKVGQASEIARQTAEESGITNSASSTLLSEYNVTNNSVALRTPRTPASQDRILQEAQNLMALTNVDTPLKGGLNTPLHESDFSGVTPQRQVVQTPNTVLSTPFRTPSNGAEGLTPRSGTTPKPVINSTPGRTPLRDKLNINPEDGMADYSDPSYVKQMERESREHLRLGLLGLPAPKNDFEIVLPENAEKELEEREIDDTYIEDAADVDARKQAIRDAERVKEMKRMHKAVQKDLPRPSEVNETILRPLNVEPPLTDLQKSEELIKKEMITMLHYDLLHHPYEPSGNKKGKTVGFGTNNSEHITYLEHNPYEKFSKEELKKAQDVLVQEMEVVKQGMSHGELSSEAYNQVWEECYSQVLYLPGQSRYTRANLASKKDRIESLEKRLEINRGHMTTEAKRAAKMEKKMKILLGGYQSRAMGLMKQLNDLWDQIEQAHLELRTFEELKKHEDSAIPRRLECLKEDVQRQQEREKELQHRYADLLLEKETLKSKF

SEQ ID NO: 4720 - protein, 194 aa, Homo sapiens
MAAAAPNAGGSAPETAGSAEAPLQYSLLLQYLVGDKRQPRLLEPGSLGGIPSPAKSEEQKMIEKAMESCAFKAALACVGGFVLGGAFGVFTAGIDTNVGFDPKDPYRTPTAKEVLKDMGQRGMSYAKNFAIVGAMFSCTECLIESYRGTSDWKNSVISGCITGGAIGFRAGLKAGAIGCGGFAAFSAAIDYYLR

SEQ ID NO: 4721 - protein, 230 aa, Homo sapiens
MAQGLIEVERKFLPGPGTEERLQELGGTLEYRVTFRDTYYDTPELSLMQADHWLRRREDSGWELKCPGAAGVLGPHTEYKELTAEPTIVAQLCKVLRADGLGAGDVAAVLGPLGLQEVASFVTKRSAWKLVLLGADEEEPQLRVDLDTADFGYAVGEVEALVHEEAEVPTALEKIHRLSSMLGVPAQETAPAKLIVYLQRFRPQDYQRLLEVNSSRERPQETEDPDHCLG

SEQ ID NO: 4722 - protein, 1016 aa, Homo sapiens
MEVAVEKAVAAAAAASAAASGGPSAAPSGENEAESRQGPDSERGGEAARLNLLDTCAVCHQNIQSRAPKLLPCLHSFCQRCLPAPQRYLMLPAPMLGSAETPPPVPAPGSPVSGSSPFATQVGVIRCPVCSQECAERHIIDNFFVKDTTEVPSSTVEKSNQVCTSCEDNAEANGFCVECVEWLCKTCIRAHQRVKFTKDHTVRQKEEVSPEAVGVTSQRPVFCPFHKKEQLKLYCETCDKLTCRDCQLLEHKEHRYQFIEEAFQNQKVIIDTLITKLMEKTKYIKFTGNQIQNRIIEVNQNQKQVEQDIKVAIFTLMVEINKKGKALLHQLESLAKDHRMKLMQQQQEVAGLSKQLEHVMHFSKWAVSSGSSTALLYSKRLITYRLRHLLRARCDASPVTNNTIQFHCDPSFWAQNIINLGSLVIEDKESQPQMPKQNPVVEQNSQPPSGLSSNQLSKFPTQISLAQLRLQHMQQQQPPPRLINFQNHSPKPNGPVLPPHPQQLRYPPNQNIPRQAIKPNPLQMAFLAQQAIKQWQISSGQGTPSTTNSTSSTPSSPTITSAAGYDGKAFGSPMIDLSSPVGGSYNLPSLPDIDCSSTIMLDNIVRKDTNIDHGQPRPPSNRTVQSPNSSVPSPGLAGPVTMTSVHPPIRSPSASSVGSRGSSGSSSKPAGADSTHKVPVVMLEPIRIKQENSGPPENYDFPVVIVKQESDEESRPQNANYPRSILTSLLLNSSQSSTSEETVLRSDAPDSTGDQPGLHQDNSSNGKSEWLDPSQKSPLHVGETRKEDDPNEDWCAVCQNGGELLCCEKCPKVFHLSCHVPTLTNFPSGEWICTFCRDLSKPEVEYDCDAPSHNSEKKKTEGLVKLTPIDKRKCERLLLFLYCHEMSLAFQDPVPLTVPDYYKIIKNPMDLSTIKKRLQEDYSMYSKPEDFVADFRLIFQNCAEFNEPDSEVANAGIKLENYFEELLKNLYPEKRFPKPEFRNESEDNKFSDDSDDDFVQPRKKRLKSIEERQLLK

SEQ ID NO: 4723 - protein, 1050 aa, Homo sapiens
MEVAVEKAVAAAAAASAAASGGPSAAPSGENEAESRQGPDSERGGEAARLNLLDTCAVCHQNIQSRAPKLLPCLHSFCQRCLPAPQRYLMLPAPMLGSAETPPPVPAPGSPVSGSSPFATQVGVIRCPVCSQECAERHIIDNFFVKDTTEVPSSTVEKSNQVCTSCEDNAEANGFCVECVEWLCKTCIRAHQRVKFTKDHTVRQKEEVSPEAVGVTSQRPVFCPFHKKEQLKLYCETCDKLTCRDCQLLEHKEHRYQFIEEAFQNQKVIIDTLITKLMEKTKYIKFTGNQIQNRIIEVNQNQKQVEQDIKVAIFTLMVEINKKGKALLHQLESLAKDHRMKLMQQQQEVAGLSKQLEHVMHFSKWAVSSGSSTALLYSKRLITYRLRHLLRARCDASPVTNNTIQFHCDPSFWAQNIINLGSLVIEDKESQPQMPKQNPVVEQNSQPPSGLSSNQLSKFPTQISLAQLRLQHMQQQVMAQRQQVQRRPAPVGLPNPRMQGPIQQPSISHQQPPPRLINFQNHSPKPNGPVLPPHPQQLRYPPNQNIPRQAIKPNPLQMAFLAQQAIKQWQISSGQGTPSTTNSTSSTPSSPTITSAAGYDGKAFGSPMIDLSSPVGGSYNLPSLPDIDCSSTIMLDNIVRKDTNIDHGQPRPPSNRTVQSPNSSVPSPGLAGPVTMTSVHPPIRSPSASSVGSRGSSGSSSKPAGADSTHKVPVVMLEPIRIKQENSGPPENYDFPVVIVKQESDEESRPQNANYPRSILTSLLLNSSQSSTSEETVLRSDAPDSTGDQPGLHQDNSSNGKSEWLDPSQKSPLHVGETRKEDDPNEDWCAVCQNGGELLCCEKCPKVFHLSCHVPTLTNFPSGEWICTFCRDLSKPEVEYDCDAPSHNSEKKKTEGLVKLTPIDKRKCERLLLFLYCHEMSLAFQDPVPLTVPDYYKIIKNPMDLSTIKKRLQEDYSMYSKPEDFVADFRLIFQNCAEFNEPDSEVANAGIKLENYFEELLKNLYPEKRFPKPEFRNESEDNKFSDDSDDDFVQPRKKRLKSIEERQLLK

SEQ ID NO: 4724 - protein, 269 aa, Homo sapiens
MKTPVELAVSGMQTLGLQHRCRGGYRVKARTSYVDETLFGSPAGTRPTPPDFDPPWVEKANRTRGVGKEASKALGAKGSCETTPSRGSTPTLTPRKKNKYRPISHTPSYCDESLFGSRSEGASFGAPRMAKGDAAKLRALLWTPPPTPRGSHSPRPREAPLRAIHPAGPSKTEPGPAADSQKLSMGGLHSSRPLKRGLSHSLTHLNVPSTGHPATSAPHTNGPQDLRPSTSGVTFRSPLVTSRARSVSISVPSTPRRGGATQKPKPPWK

SEQ ID NO: 4725 - protein, 232 aa, Homo sapiens
MGSVLSTDSGKSAPASATARALERRRDPELPVTSFDCAVCLEVLHQPVRTRCGHVFCRSCIATSLKNNKWTCPYCRAYLPSEGVPATDVAKRMKSEYKNCAECDTLVCLSEMRAHIRTCQKYIDKYGPLQELEETAARCVCPFCQRELYEDSLLDHCITHHRSERRPVFCPLCRLIPDENPSSFSGSLIRHLQVSHTLFYDDFIDFNIIEEALIRRVLDRSLLEYVNHSNTT

SEQ ID NO: 4726 - protein, 311 aa, Homo sapiens [sequence omitted]

SEQ ID NO: 4727 - protein, 311 aa, Homo sapiens [sequence omitted]

SEQ ID NO: 4728 - protein, 263 aa, Homo sapiens
MLQFVRAGARAWLRPTGSQGLSSLAEEAARATENPEQVASEGLPEPVLRKVELPVPTHRRPVQAWVESLRGFEQERVGLADLHPDVFATAPRLDILHQVAMWQKNFKRISYAKTKTRAEVRGGGRKPWPQKGTGRARHGSIRSPLWRGGGVAHGPRGPTSYYYMLPMKVRALGLKVALTVKLAQDDLHIMDSLELPTGDPQYLTELAHYRRWGDSVLLVDLTHEEMPQSIVEATSRLKTFNLIPAVGEQRAQAPRVRMCRLRC

SEQ ID NO: 4729 - protein, 119 aa, Homo sapiens
MSRSVALAVLALLSLSGLEAIQRTPKIQVYSRHPAENGKSNFLNCYVSGFHPSDIEVDLLKNGERIEKVEHSDLSFSKDWSFYLLYYTEFTPTEKDEYACRVNHVTLSQPKIVKWDRDM

SEQ ID NO: 4730 - protein, 296 aa, Homo sapiens
MANVLCNRARLVSYLPGFCSLVKRVVNPKAFSTAGSSGSDESHVAAAPPDICSRTVWPDETMGPFGPQDQRFQLPGNIGFDCHLNGTASQKKSLVHKTLPDVLAEPLSSERHEFVMAQYVNEFQGNDAPVEQEINSAETYFESARVECAIQTCPELLRKDFESLFPEVANGKLMILTVTQKTKNDMTVWSEEVEIEREVLLEKFINGAKEICYALRAEGYWADFIDPSSGLAFFGPYTNNTLFETDERYRHLGFSVDDLGCCKVIRHSLWGTHVVVGSIFTNATPDSHIMKKLSGN

SEQ ID NO: 4731 - protein, 563 aa, Homo sapiens
MNPLFGPNLFLLQQEQQGLAGPLGDSLGGDHFAGGGDLPPAPLSPAGPAAYSPPGPGPAPPAAMALRNDLGSNINVLKTLNLRFRCFLAKVHELERRNRLLEKQLQQALEEGKQGRRGLGRRDQAVQTGFVSPIRPLGLQLGARPAAVCSPSARVLGSPARSPAGPLAPSAASLSSSSTSTSTTYSSSARFMPGTIWSFSHARRLGPGLEPTLVQGPGLSWVHPDGVGVQIDTITPEIRALYNVLAKVKRERDEYKRRWEEEYTVRIQLQDRVNELQEEAQEADACQEELALKVEQLKAELVVFKGLMSNNLSELDTKIQEKAMKVDMDICRRIDITAKLCDVAQQRNCEDMIQMFQKKLVPSMGGRKRERKAAVEEDTSLSESEGPRQPDGDEEESTALSINEEMQRMLNQLREYDFEDDCDSLTWEETEETLLLWEDFSGYAMAAAEAQGEQQEDSLEKVIKDTESLFKTREKEYQETIDQIELELATAKNDMNRHLHEYMEMCSMKRGLDVQMETCRRLITQSGDRKSPAFTAVPLSDPPPPPSEAEDSDRDVSSDSSMR

SEQ ID NO: 4732 - protein, 559 aa, Homo sapiens
MNPLFGPNLFLLQQEQQGLAGPLGDSLGGDHFAGGGDLPPAPLSPAGPAAYSPPGPGPAPPAAMALRNDLGSNINVLKTLNLRFRCFLAKVHELERRNRLLEKQLQQALEEGKQGRRGLGRRDQAVQTGFVSPIRPLGLQLGARPAAVCSPSARVLGSPARSPAGPLAPSAASLSSSSTSTSTTYSSSARFMPGTIWSFSHARRLGPGLEPTLVQGPGLSWVHPDGVGVQIDTITPEIRALYNVLAKVKRERDEYKRRWEEEYTVRIQLQDRVNELQEEAQEADACQEELALKVEQLKAELVVFKGLMSNNLSELDTKIQEKAMKVDMDICRRIDITAKLCDVAQQRNCEDMIQMFQVPSMGGRKRERKAAVEEDTSLSESEGPRQPDGDEEESTALSINEEMQRMLNQLREYDFEDDCDSLTWEETEETLLLWEDFSGYAMAAAEAQGEQEDSLEKVIKDTESLFKTREKEYQETIDQIELELATAKNDMNRHLHEYMEMCSMKRGLDVQMETCRRLITQSGDRKSPAFTAVPLSDPPPPPSEAEDSDRDVSSDSSMR

SEQ ID NO: 4733 - protein, 200 aa, Homo sapiens
MGGRKRERKAAVEEDTSLSESEGPRQPDGDEEESTALSINEEMQRMLNQLREYDFEDDCDSLTWEETEETLLLWEDFSGYAMAAAEAQGEQQEDSLEKVIKDTESLFKTREKEYQETIDQIELELATAKNDMNRHLHEYMEMCSMKRGLDVQMETCRRLITQSGDRKSPAFTAVPLSDPPPPPSEAEDSDRDVSSDSSMR

SEQ ID NO: 4734 - protein, 318 aa, Homo sapiens
MLSESSSFLKGVMLGSIFCALITMLGHIRIGHGNRMHHHEHHHLQAPNKEDILKISEDERMELSKSFRVYCIILVKPKDVSLWAAVKETWTKHCDKAEFFSSENVKVFESINMDTNDMWLMMRKAYKYAFDKYRDQYNWFFLARPTTFAIIENLKYFLLKKDPSQPFYLGHTIKSGDLEYVGMEGGIVLSVESMKRLNSLLNIPEKCPEQGGMIWKISEDKQLAVCLKYAGVFAENAEDADGKDVFNTKSVGLSIKEAMTYHPNQVVEGCCSDMAVTFNGLTPNQMHVMMYGVYRLRAFGHIFNDALVFLPPNGSDND

SEQ ID NO: 4735 - protein, 318 aa, Homo sapiens; identical to SEQ ID NO: 4734

SEQ ID NO: 4736 - protein, 525 aa, Homo sapiens
MPLFTANPFEQDVEKATNEYNTTEDWSLIMDICDKVGSTPNGAKDCLKAIMKRVNHKVPHVALQALTLLGACVANCGKIFHLEVCSRDFATEVRAVIKNKAHPKVCEKLKSLMVEWSEEFQKDPQFSLISATIKSMKEEGITFPPAGSQTVSAAAKNGTSSNKNKEDEDIAKAIELSLQEQKQQHTETKSLYPSSEIQLNNKVARKVRALYDFEAVEDNELTFKHGEIIIVLDDSDANWWKGENHRGIGLFPSDFVTTNLNIETEVAAVDKLNVIDDDVEEIKKSEPEPVYIDEDKMDRALQVLQSIDPTDSKPDSQDLLDLEDICQQMGPMIDEKLEEIDRKHSELSELNVKVLEALELYNKLVNEAPVYSVYSKLHPPAHYPPASSGVPMQTYPVQSHGGNYMGQSIHQVTVAQSYSLGPDQIGPLRSLPPNVNSSVTAQPAQTSYLSTGQDTVSNPTYMNQNSNLQSATGTTAYTQQMGMSVDMSSYQNTTSNLPQLAGFPVTVPAHPVAQQHTNYHQQPLL

SEQ ID NO: 4737 - protein, 75 aa, Homo sapiens
MAPEVLPKPRMRGLLARRLRNHMAVAFVLSLGVAALYKFRVADQRKKAYADFYRNYDVMKDFEEMRKAGIFQSVK

SEQ ID NO: 4738 - protein, 348 aa, Homo sapiens
MTLQWAAVATFLYAEIGLILIFCLPFIPPQRWQKIFSFNVWGKIATFWNKAFLTIIILLIVLFLDAVREVRKYSSVHTIEKSSTSRPDAYEHTQMKLFRSQRNLYISGFSLFFWLVLRRLVTLITQLAKELSNKGVLKTQAENTNKAAKKFMEENEKLKRILKSHGKDEECVLEAENKKLVEDQEKLKTELRKTSDALSKAQNDVMEMKMQSERLSKEYDQLLKEHSELQHSSFGEFLSKRSHKNGSIGKQTGSRKGSFRKRQQEKTVNFIKDTCNILCQNDNFVMLASRKFKFRKMHYDRFVIFLMPHIGCIVMALSKYLMMFQIYCKVCIPALKKNISMLNTIFTY

SEQ ID NO: 4739 - protein, 337 aa, Homo sapiens
MTLQWAAVATFLYAEIGLILIFCLPFIPPQRWQKIFSFNVWGKIATFWNKAFLTIIILLIVLFLDAVREVRKYSSVHTIEKSSTSRPDAYEHTQMKLFRSQRNLYISGFSLFFWLVLRRLVTLITQLAKELSNKGVLKTQAENTNKAAKKFMEENEKLKRILKSHGKDEECVLEAENKKLVEDQEKLKTELRKTSDALSKAQNDVMEMKMQSERLSKEYDQLLKEHSELQKQREILPHRRGESTVTTEAEIGVMEPQQRNADSHQKLEEAKNRFFPRASSSRSMALQIPIKLILDFLASRTMGINLLFQAIKFVIICYCCHSKLIQEHAGQICNGLN

SEQ ID NO: 4740 - protein, 244 aa, Homo sapiens
MTLQWAAVATFLYAEIGLILIFCLPFIPPQRWQKIFSFNVWGKIATFWNKAFLTIIILLIVLFLDAVREVRKYSSVHTIEKSSTSRPDAYEHTQMKLFRSQRNLYISGFSLFFWLVLRRLVTLITQLAKELSNKGVLKTQAENTNKAAKKFMEENEKLKRILKSHGKDEECVLEAENKKLVEDQEKLKTELRKTSDALSKAQNDVMEMKMQSERLSKEYDQLLKEHSELQVFAKLLNYLLMRKW

SEQ ID NO: 4741 - protein, 241 aa, Homo sapiens
MTLQWAAVATFLYAEIGLILIFCLPFIPPQRWQKIFSFNVWGKIATFWNKAFLTIIILLIVLFLDAVREVRKYSSVHTIEKSSTSRPDAYEHTQMKLFRSQRNLYISGFSLFFWLVLRRLVTLITQLAKELSNKGVLKTQAENTNKAAKKFMEENEKLKRILKSHGKDEECVLEAENKKLVEDQEKLKTELRKTSDALSKAQNDVMEMKMQSERLSKEYDQLLKEHSELQDRLERGNKKRL

SEQ ID NO: 4742 - protein, 1181 aa, Homo sapiens
MSLLNPVLLPPKVKAYLSQGERFIKWDDETTVASPVILRVDPKGYYLYWTYQSKEMEFLDITSIRDTRFGKFAKMPKSQKLRDVFNMDFPDNSFLLKTLTVVSGPDMVDLTFHNFVSYKENVGKAWAEDVLALVKHPLTANASRSTFLDKILVKLKMQLNSEGKIPVKNFFQMFPADRKRVEAALSACHLPKGKNDAINPEDFPEPVYKSFLMSLCPRPEIDEIFTSYHAKAKPYMTKEHLTKFINQKQRDSRLNSLLFPPARPDQVQGLIDKYEPSGINAQRGQLSPEGMVWFLCGPENSVLAQDKLLLHHDMTQPLNHYFINSSHNTYLTAGQFSGLSSAEMYRQVLLSGCRCVELDCWKGKPPDEEPIITHGFTMTTDIFFKEAIEAIAESAFKTSPYPIILSFENHVDSPRQQAKMAEYCRTIFGDMLLTEPLEKFPLKPGVPLPSPEDLRGKILIKNKKNQFSGPTSSSKDTGGEAEGSSPPSAPAVWAGEEGTELEEEEVEEEEEEESGNLDEEEIKKMQSDEGTAGLEVTAYEEMSSLVNYIQPTKFVSFEFSAQKNRSYVISSFTELKAYDLLSKASVQFVDYNKRQMSRIYPKGTRMDSSNYMPQMFWNAGCQMVALNFQTMDLPMQQNMAVFEFNGQSGYLLKHEFMRRPDKQFNPFSVDRIDVVVATTLSITVISGQFLSERSVRTYVEVELFGLPGDPKRRYRTKLSPSTNSINPVWKEEPFVFEKILMPELASLRVAVMEEGNKFLGHRIIPINALNSGYHHLCLHSESNMPLTMPALFIFLEMKDYIPGAWADLTVALANPIKFFSAHDTKSVKLKEAMGGLPEKPFPLASPVASQVNGALAPTSNGSPAARAGAREEAMKEAAEPRTASLEELRELKGVVKLQRRHEKELRELERRGARRWEELLQRGAAQLAELGPPGVGGVGACKLGPGKGSRKKRSLPREESAGAAPGEGPEGVDGRVRELKDRLELELLRQGEEQYECVLKRKEQHVAEQISKMMELAREKQAAELKALKETSENDTKEMKKKLETKRLERIQGMTKVTTDKMAQERLKREINNSHIQEVVQVIKQMTENLERHQEKLEEKQAACLEQIREMEKQFQKEALAEYEARMKGLEAEVKESVRACLRTCFPSEAKDKPERACECPPELCEQDPLIAKADAQESRL

SEQ ID NO: 4743 - protein, 196 aa, Homo sapiens
MWFMYLLSWLSLFIQVAFITLAVAAGLYYLAELIEEYTVATSRIIKYMIWFSTAVLIGLYVFERFPTSMIGVGLFTNLVYFGLLQTFPFIMLTSPNFILSCGLVVVNHYLAFQFFAEEYYPFSEVLAYFTFCLWIIPFAFFVSLSAGENVLPSTMQPGDDVVSNYFTKGKRGKRLGILVVFSFIKEAILPSRQKIY

SEQ ID NO: 4744 - protein, 384 aa, Homo sapiens
MPQLDSGGGGAGGGDDLGAPDELLAFQDEGEEQDDKSRDSAAGPERDLAELKSSLVNESEGAAGGAGIPGVPGAGAGARGEAEALGREHAAQRLFPDKLPEPLEDGLKAPECTSGMYKETVYSAFNLLMHYPPPSGAGQHPQPQPPLHKANQPPHGVPQLSLYEHFNSPHPTPAPADISQKQVHRPLQTPDLSGFYSLTSGSMGQLPHTVSWFTHPSLMLGSGVPGHPAAIPHPAIVPPSGKQELQPFDRNLKTQAESKAEKEAKKPTIKKPLNAFMLYMKEMRAKVIAECTLKESAAINQILGRRWHALSREEQAKYYELARKERQLHMQLYPGWSARDNYGKKKRRSREKHQESTTGGKRNAFGTYPEKAAAPAPFLPMTVL

SEQ ID NO: 4745 - protein, 269 aa, Homo sapiens
MYKETVYSAFNLLMHYPPPSGAGQHPQPQPPLHKANQPPHGVPQLSLYEHFNSPHPTPAPADISQKQVHRPLQTPDLSGFYSLTSGSMGQLPHTVSWFTHPSLMLGSGVPGHPAAIPHPAIVPPSGKQELQPFDRNLKTQAESKAEKEAKKPTIKKPLNAFMLYMKEMRAKVIAECTLKESAAINQILGRRWHALSREEQAKYYELARKERQLHMQLYPGWSARDNYGKKKRRSREKHQESTTGGKRNAFGTYPEKAAAPAPFLPMTVL

SEQ ID NO: 4746 - protein, 269 aa, Homo sapiens
MYKETVYSAFNLLMHYPPPSGAGQHPQPQPPLHKANQPPHGVPQLSLYEHFNSPHPTPAPADISQKQVHRPLQTPDLSGFYSLTSGSMGQLPHTVSWFTHPSLMLGSGVPGHPAAIPHPAIVPPSGKQELQPFDRNLKTQAESKAEKEAKKPTIKKPLNAFMLYMKEMRAKVIAECTLKESAAINQILGRRWHALSREEQAKYYELARKERQLHMQLYPGWSARDNYGKKKRRSREKHQESTTETNWPRELKDGNGQESLSMSSSSSPA

SEQ ID NO: 4747 - protein, 268 aa, Homo sapiens
MYKETVYSAFNLLMHYPPPSGAGQHPQPQPPLHKANQPPHGVPQLSLYEHFNSPHPTPAPADISQKQVHRPLQTPDLSGFYSLTSGSMGQLPHTVSWFTHPSLMLGSGVPGHPAAIPHPAIVPPSGKQELQPFDRNLKTQAESKAEKEAKKPTIKKPLNAFMLYMKEMRAKVIAECTLKESAAINQILGRRWHALSREEQAKYYELARKERQLHMQLYPGWSARDNYGKKKRRSREKHQESTTDPGSPKKCRARFGLNQQTDWCGPCR

SEQ ID NO: 4748 - protein, 269 aa, Homo sapiens; identical to SEQ ID NO: 4745

SEQ ID NO: 4749 - protein, 1386 aa, Homo sapiens
MRINEQIDQGSKLNQTSKSTMEKMEGSTISSNGTLGAASNVFESRAPEGKKLDERIIFDALKLSSDVQKSAPVPPRRRPNAERKDNVNRRSWKSFMPPNFPEFAERIEASLSEVSEAGASNPSLQEKKESSSALTESSGHLDHREPQSESVTLEHVSKSIGIPEVQDFKNLSGDCQDFRFQQHSANPPHEFQPVESEAVATSGNTDVMQESRFSSATWPRATKSLAKGGFSEKQHPLGDTACTVEMPPLSPCLSEELLDPELHVLITPSLREKTESELKFEEDERWIMMEAEGEWEEEKLSDREKTFLMADEKNSLADIFEEREQANTAVVEDGSDCLAAVLRTFGHLSLGQICCPDDPQPAKDQLATVPKDIPLDCDCVLTGEDILGEVANRTAQGLEGLVSDSACTVGTIDAEQLSDTDSVQMFLELEKECLCEEGVTPLVELQNQISSEGLAASQDAENLLVISHFSGAALEKEQHLGLLHVRAKDYDTRLDCGYFNTLDSSQVPNAVELIAHVDIMRDTSTVSKEECEKVPFSPRTAEFKSRQPADLDSLEKLDPGGLLNSDHRVSHEEKLSGFIASELAKDNGSLSQGDCSQTEGNGEECIERVTFSFAFNHELTDVTSGPEVEVLYESNLLTDEIHLESGNVTVNQENNSLTSMGNVVTCELSVEKVCDEDGEAKELDYQATLLEDQAPAHFHRNFPEQVFQDLQRKSPESEILSLHLLVEELRLNPDGVETVNDTKPELNVASSEGGEMERRDSDSFLNIFPEKQVTKAGNTEPVLEEWIPVLQRPSRTAAVPTVKDALDAALPSPEEGTSIAAVPAPEGTAVVAALVPFPHEDILVASIVSLEEEDVTAAAVSAPERATVPAVTVSVPEGTAAVAAVSSPEETAPAVAAAITQEGMSAVAGFSPEWAALAITVPITEEDGTPEGPVTPATTVHAPEEPDTAAVRVSTPEEPASPAAAVPTPEEPTSPAAAVPTPEEPTSPAAAVPPPEEPTSPAAAVPTPEEPTSPAAAVPTPEEPTSPAAAVPTPEEPTSPAAAVPTPEEPTSPAAAVPTPEEPTSPAAAVPTPEEPASPAAAVPTPEEPASPAAAVPTPEEPAFPAPAVPTPEESASAAVAVPTPEESASPAAAVPTPAESASFAAVVATLEEPTSPAASVPTPAAMVATLEEFTSPAASVPTSEEPASLAAAVSNPEEPTSPAAAVPTLEEPTSSAAAVLTPEELSSPAASVPTPEEPASPAAAVSNLEEPASPAAAVPTPEVAAIPAASVPTPEVPAIPAAAVPPMEEVSPIGVPFLGVSAHTDSVPISEEGTPVLEEASSTGMWIKEDLDSLVFGIKEVTSTVLHGKVPLAATAGLNSDEVIVHFDSGKGLKSKVRFAGLTWW

SEQ ID NO: 4750 - protein, 788 aa, Homo sapiens
MDVSGQETDWRSTAFRQKLVSQIEDAMRKAGVAHSKSSKDMESHVFLKAKTRDEYLSLVARLIIHFRDIHNKKSQASVSDPMNALQSLTGGPAAGAAGIGMPPRGPGQSLGGMGSLGAMGQPMSLSGQPPPGTSGMAPHSMAVVSTATPQTQLQLQQVALQQQQQQQQFQQQQQAALQQQQQQQQQQQFQAQQSAMQQQFQAVVQQQQQLQQQQQQQQHLIKLHHQNQQQIQQQQQQLQRIAQLQLQQQQQQQQQQQQQQQQALQAQPPIQQPPMQQPQPPPSQALPQQLQQMHHTQHHQPPPQPQQPPVAQNQPSQLPPQSQTQPLVSQAQALPGQMLYTQPPLKFVRAPMVVQQPPVQPQVQQQQTAVQTAQAAQMVAPGVQMITEALAQGGMHIRARFPPTTAVSAIPSSSIPLGRQPMAQVSQSSLPMLSSPSPGQQVQTPQSMPPPPQPSPQPGQPSSQPNSNVSSGPAPSPSSFLPSPSPQPSQSPVTARTPQNFSVPSPGPLNTPVNPSSVMSPAGSSQAEEQQYLDKLKQLSKYIEPLRRMINKIDKNEDRKKDLSKMKSLLDILTDPSKRCPLKTLQKCEIALEKLKNDMAVPTPPPPPVPPTKQQYLCQPLLDAVLANIRSPVFNHSLYRTFVPAMTAIHGPPITAPVVCTRKRRLEDDERQSIPSVLQGEVARLDPKFLVNLDPSHCSNNGTVHLICKLDDKDLPSVPPLELSVPADYPAQSPLWIDRQWQYDANPFLQSVHRCMTSRLLQLPDKHSVTALLNTWAQSVHQACLSAA

SEQ ID NO: 4751 - protein, 748 aa, Homo sapiens
MDVSGQETDWRSTAFRQKLVSQIEDAMRKAGVAHSKSSKDMESHVFLKAKTRDEYLSLVARLIIHFRDIHNKKSQASVSDPMNALQSLTGGPAAGAAGIGMPPRGPGQSLGGMGSLGAMGQPMSLSGQPPPGTSGMAPHSMAVVSTATPQTQLQLQQVALQQQQQQQQFQQQQQAALQQQQQQQQQQQFQAQQSAMQQQFQAVVQQQQQLQQQQQQQQHLIKLHHQNQQQIQQQQQQLQRIAQLQLQQQQQQQQQQQQQQQQALQAQPPIQQPPMQQPQPPPSQALPQQLQQMHHTQHHQPPPQPQQPPVAQNQPSQLPPQSQTQPLVSQAQALPGQMLYTQPPLKFVRAPMVVQQPPVQPQVQQQQTAVQTAQAAQMVAPGVQVSQSSLPMLSSPSPGQQVQTPQSMPPPPQPSPQPGQPSSQPNSNVSSGPAPSPSSFLPSPSPQPSQSPVTARTPQNFSVPSPGPLNTPVNPSSVMSPAGSSQAEEQQYLDKLKQLSKYIEPLRRMINKIDKNEDRKKDLSKMKSLLDILTDPSKRCPLKTLQKCEIALEKLKNDMAVPTPPPPPVPPTKQQYLCQPLLDAVLANIRSPVFNHSLYRTFVPAMTAIHGPPITAPVVCTRKRRLEDDERQSIPSVLQGEVARLDPKFLVNLDPSHCSNNGTVHLICKLDDKDLPSVPPLELSVPADYPAQSPLWIDRQWQYDANPFLQSVHRCMTSRLLQLPDKHSVTALLNTWAQSVHQACLSAA

SEQ ID NO: 4752 - protein, 1068 aa, Homo sapiens
MTTANCGAHDELDFKLVFGEDGAPAPPPPGSRPADLEPDDCASIYIFNVDPPPSTLTTPLCLPHHGLPSHSSVLSPSFQLQSHKNYEGTCEIPESKYSPLGGPKPFECPSIQITSISPNCHQELDAHEDDLQINDPEREFLERPSRDHLYLPLEPSYRESSLSPSPASSISSRSWFSDASSCESLSHIYDDVDSELNEAAARFTLGSPLTSPGGSPGGCPGEETWHQQYGLGHSLSPRQSPCHSPRSSVTDENWLSPRPASGPSSRPTSPCGKRRHSSAEVCYAGSLSPHHSPVPSPGHSPRGSVTEDTWLNASVHGGSGLGPAVFPFQYCVETDIPLKTRKTSEDQAAILPGKLELCSDDQGSLSPARETSIDDGLGSQYPLKKDSCGDQFLSVPSPFTWSKPKPGHTPIFRTSSLPPLDWPLPAHFGQCELKIEVQPKTHHRAHYETEGSRGAVKASTGGHPVVKLLGYNEKPINLQMFIGTADDRYLRPHAFYQVHRITGKTVATASQEIIIASTKVLEIPLLPENNMSASIDCAGILKLRNSDIELRKGETDIGRKNTRVRLVFRVHIPQPSGKVLSLQIASIPVECSQRSAQELPHIEKYSINSCSVNGGHEMVVTGSNFLPESKIIFLEKGQDGRPQWEVEGKIIREKCQGAHIVLEVPPYHNPAVTAAVQVHFYLCNGKRKKSQSQRFTYTPVLMKQEHREEIDLSSVPSLPVPHPAQTQRPSSDSGCSHDSVLSGQRSLICSIPQTYASMVTSSHLPQLQCRDESVSKEQHMIPSPIVHQPFQVTPTPPVGSSYQPMQTNVVYNGPTCLPINAASSQEFDSVLFQQDATLSGLVNLGCQPLSSIPFHSSNSGSTGHLLAHTPHSVHTLPHLQSMGYHCSNTGQRSLSSPVADQITGQPSSQLQPITYGPSHSGSATTASPAASHPLASSPLSGPPSPQLQPMPYQSPSSGTASSPSPATRMHSGQHSTQAQSTGQGGLSAPSSLICHSLCDPASFPPDGATVSIKPEPEDREPNFATIGLQDITLDDDQFISDLEHQPSGSAEKWPNHSVLSCPAPFWRI

SEQ ID NO: 4753 - protein, 1065 aa, Homo sapiens
MTTANCGAHDELDFKLVFGEDGAPAPPPPGSRPADLEPDDCASIYIFNVDPPPSTLTTPLCLPHHGLPSHSSVLSPSFQLQSHKNYEGTCEIPESKYSPLGGPKPFECPSIQITSISPNCHQELDAHEDDLQINDPEREFLERPSRDHLYLPLEPSYRESSLSPSPASSISSRSWFSDASSCESLSHIYDDVDSELNEAAARFTLGSPLTSPGGSPGGCPGEETWHQQYGLGHSLSPRQSPCHSPRSSVTDENWLSPRPASGPSSRPTSPCGKRRHSSAEVCYAGSLSPHHSPVPSPGHSPRGSVTEDTWLNASVHGGSGLGPAVFPFQYCVETDIPLKTRKTSEDQAAILPGKLELCSDDQGSLSPARETSIDDGLGSQYPLKKDSCGDQFLSVPSPFTWSKPKPGHTPIFRTSSLPPLDWPLPAHFGQCELKIEVQPKTHHRAHYETEGSRGAVKASTGGHPVVKLLGYNEKPINLQMFIGTADDRYLRPHAFYQVHRITGKTVATASQEIIIASTKVLEIPLLPENNMSASIDCAGILKLRNSDIELRKGETDIGRKNTRVRLVFRVHIPQPSGKVLSLQIASIPVECSQRSAQELPHIEKYSINSCSVNGGHEMVVTGSNFLPESKIIFLEKGQDGRPQWEVEGKIIREKCQGAHIVLEVPPYHNPAVTAAVQVHFYLCNGKRKKSQSQRFTYTPVLMKQEHREEIDLSSVPSLPVPHPAQTQRPSSDSGCSHDSVLSGQRSLICSIPQTYASMVTSSHLPQLQCRDESVSKEQHMIPSPIVHQPFQVTPTPPVGSSYQPMQTNVVYNGPTCLPINAASSQEFDSVLFQQDATLSGLVNLGCQPLSSIPFHSSNSGSTGHLLAHTPHSVHTLPHLQSMGYHCSNTGQRSLSSPVADQITGQPSSQLQPITYGPSHSGSATTASPAASHPLASSPLSGPPSPQLQPMPYQSPSSGTASSPSPATRMHSGQHSTQAQSTGQGGLSAPSSLICHSLCDPASFPPDGATVSIKPEPEDREPNFATIGLQDITLDDDLFTSNNFDLLQLRPTFWPVPAGRYLRNLE

SEQ ID NO: 4754 - protein, 1045 aa, Homo sapiens
MTTANCGAHDELDFKLVFGEDGAPAPPPPGSRPADLEPDDCASIYIFNVDPPPSTLTTPLCLPHHGLPSHSSVLSPSFQLQSHKNYEGTCEIPESKYSPLGGPKPFECPSIQITSISPNCHQELDAHEDDLQINDPEREFLERPSRDHLYLPLEPSYRESSLSPSPASSISSRSWFSDASSCESLSHIYDDVDSELNEAAARFTLGSPLTSPGGSPGGCPGEETWHQQYGLGHSLSPRQSPCHSPRSSVTDENWLSPRPASGPSSRPTSPCGKRRHSSAEVCYAGSLSPHHSPVPSPGHSPRGSVTEDTWLNASVHGGSGLGPAVFPFQYCVETDIPLKTRKTSEDQAAILPGKLELCSDDQGSLSPARETSIDDGLGSQYPLKKDSCGDQFLSVPSPFTWSKPKPGHTPIFRTSSLPPLDWPLPAHFGQCELKIEVQPKTHHRAHYETEGSRGAVKASTGGHPVVKLLGYNEKPINLQMFIGTADDRYLRPHAFYQVHRITGKTVATASQEIIIASTKVLEIPLLPENNMSASIDCAGILKLRNSDIELRKGETDIGRKNTRVRLVFRVHIPQPSGKVLSLQIASIPVECSQRSAQELPHIEKYSINSCSVNGGHEMVVTGSNFLPESKIIFLEKGQDGRPQWEVEGKIIREKCQGAHIVLEVPPYHNPAVTAAVQVHFYLCNGKRKKSQSQRFTYTPVLMKQEHREEIDLSSVPSLPVPHPAQTQRPSSDSGCSHDSVLSGQRSLICSIPQTYASMVTSSHLPQLQCRDESVSKEQHMIPSPIVHQPFQVTPTPPVGSSYQPMQTNVVYNGPTCLPINAASSQEFDSVLFQQDATLSGLVNLGCQPLSSIPFHSSNSGSTGHLLAHTPHSVHTLPHLQSMGYHCSNTGQRSLSSPVADQITGQPSSQLQPITYGPSHSGSATTASPAASHPLASSPLSGPPSPQLQPMPYQSPSSGTASSPSPATRMHSGQHSTQAQSTGQGGLSAPSSLICHSLCDPASFPPDGATVSIKPEPEDREPNFATIGLQDITLDDGKFISDMFLK

SEQ ID NO: 4755 - protein, 1075 aa, Homo sapiens
MTTANCGAHDELDFKLVFGEDGAPAPPPPGSRPADLEPDDCASIYIFNVDPPPSTLTTPLCLPHHGLPSHSSVLSPSFQLQSHKNYEGTCEIPESKYSPLGGPKPFECPSIQITSISPNCHQELDAHEDDLQINDPEREFLERPSRDHLYLPLEPSYRESSLSPSPASSISSRSWFSDASSCESLSHIYDDVDSELNEAAARFTLGSPLTSPGGSPGGCPGEETWHQQYGLGHSLSPRQSPCHSPRSSVTDENWLSPRPASGPSSRPTSPCGKRRHSSAEVCYAGSLSPHHSPVPSPGHSPRGSVTEDTWLNASVHGGSGLGPAVFPFQYCVETDIPLKTRKTSEDQAAILPGKLELCSDDQGSLSPARETSIDDGLGSQYPLKKDSCGDQFLSVPSPFTWSKPKPGHTPIFRTSSLPPLDWPLPAHFGQCELKIEVQPKTHHRAHYETEGSRGAVKASTGGHPVVKLLGYNEKPINLQMFIGTADDRYLRPHAFYQVHRITGKTVATASQEIIIASTKVLEIPLLPENNMSASIDCAGILKLRNSDIELRKGETDIGRKNTRVRLVFRVHIPQPSGKVLSLQIASIPVECSQRSAQELPHIEKYSINSCSVNGGHEMVVTGSNFLPESKIIFLEKGQDGRPQWEVEGKIIREKCQGAHIVLEVPPYHNPAVTAAVQVHFYLCNGKRKKSQSQRFTYTPVLMKQEHREEIDLSSVPSLPVPHPAQTQRPSSDSGCSHDSVLSGQRSLICSIPQTYASMVTSSHLPQLQCRDESVSKEQHMIPSPIVHQPFQVTPTPPVGSSYQPMQTNVVYNGPTCLPINAASSQEFDSVLFQQDATLSGLVNLGCQPLSSIPFHSSNSGSTGHLLAHTPHSVHTLPHLQSMGYHCSNTGQRSLSSPVADQITGQPSSQLQPITYGPSHSGSATTASPAASHPLASSPLSGPPSPQLQPMPYQSPSSGTASSPSPATRMHSGQHSTQAQSTGQGGLSAPSSLICHSLCDPASFPPDGATVSIKPEPEDREPNFATIGLQDITLDDVNEIIGRDMSQISVSQGAGVSRQAPLPSPESLDLGRSDGL

SEQ ID NO: 4756 - protein, 262 aa, Homo sapiens
MGKTFSQLGSWREDENKSILSSKPAIGSKAVNYSSTGSSKSFCSCVPCEGTADASFVTCPTCQGSGKIPQELEKQLVALIPYGDQRLKPKHTKLFVFLAVLICLVTSSFIVFFLFPRSVIVQPAGLNSSTVAFDEADIYLNITNILNISNGNYYPIMVTQLTLEVLHLSLVVGQVSNNLLLHIGPLASEQMFYAVATKIRDENTYKICTWLEIKVHHVLLHIQGTLTCSYLSHSEQLVFQSYEYVDCRGNASVPHQLTPHPP

SEQ ID NO: 4757 - protein, 284 aa, Homo sapiens
MWRGLALARAIGCAARGRGQWAVRAADCAQSGRHPGPAVVCGRRLISVLEQIRHFVMMPEINTNHLDKQQVQLLAEMCILIDENDNKIGAETKKNCHLNENIEKGLLHRAFSVFLFNTENKLLLQQRSDAKITFPGCFTNTCCSHPLSNPAELEESDALGVRRAAQRRLKAELGIPLEEVPPEEINYLTRIHYKAQSDGIWGEHEIDYILLVRKNVTLNPDPNEIKSYCYVSKEELKELLKKAASGEIKITPWFKIIAATFLFKWWDNLNHLNQFVDHEKIYRM

SEQ ID NO: 4758 - protein, 1591 aa, Homo sapiens
MGNAESQHVEHEFYGEKHASLGRNDTSRSLRLSHKTRRTRHASSGKVIHRNSEVSTRSSSTPSIPQSLAENGLEPFSQDGTLEDFGSPIWVDRVDMGLRPVSYTDSSVTPSVDSSIVLTAASVQSMPDTEESRLYGDDATYLAEGGRRQHSYTSNGPTFMETASFKKKRSKSADIWREDSLEFSLSDLSQEHLTSNEEILGSAEEKDCEEARGMETRASPRQLSTCQRANSLGDLYAQKNSGVTANMGPGSKFAGYCRNLVSDIPNLANHKMPPAAAEETPPYSNYNTLPCRKSHCLSEGATNPQISHSNSMQGRRAKTTQDVNAGEGSEFADSGIEGATTDTDLLSRRSNATNSSYSPTTGRAFVGSDSGSSSTGDAARQGVYENFRRELEMSTTNSESLEEAGSAHSDEQSSGTLSSPGQSDILLTAAQGTVRKAGALAVKNFLVHKKNKKVESATRRKWKHYWVSLKGCTLFFYESDGRSGIDHNSIPKHAVWVENSIVQAVPEHPKKDFVFCLSNSLGDAFLFQTTSQTELENWITAIHSACATAVARHHHKEDTLRLLKSEIKKLEQKIDMDEKMKKMGEMQLSSVTDSKKKKTILDQIFVWEQNLEQFQMDLFRFRCYLASLQGGELPNPKRLLAFASRPTKVAMGRLGIFSVSSFHALVAARTGETGVRRRTQAMSRSASKRRSRFSSLWGLDTTSKKKQGRPSINQVFGEGTEAVKKSLEGIFDDIVPDGKREKEVVLPNVHQHNPDCDIWVHEYFTPSWFCLPNNQPALTVVRPGDTARDTLELICKTHQLDHSAHYLRLKFLIENKMQLYVPQPEEDIYELLYKEIEICPKVTHSIHIEKSDTAADTYGFSLSSVEEDGIRRLYVNSVKETGLASKKGLKAGDEILEINNRAADALNSSMLKDFLSQPSLGLLVRTYPELEEGVELLESPPHRVDGPADLDESPLAFLTSNPGHSLCSEQGSSAETAPEETEGPDLESSDETDHSSKSTEQVAAFCRSLHEMNPSDQNPSPQDSTGPQLATMRQLSDADNVRKVICELLETERTYVKDLNCLMERYLKPLQKETFLTQDELDVLFGNLTEMVEFQVEFLKTLEDGVRLVPDLEKLEKVDQFKKVLFSLGGSFLYYADRFKLYSAFCAIHTKVPKVLVKAKTDTAFKAFLDAQNPKQQHSSTLESYLIKPIQRILKYPLLLRELFALTDAESEEHYHLDVAIKTMNKVASHINEMQKIHEEFGAVFDQLIAEQTGEKKEVADLSMGDLLLHTTVIWLNPPASLGKWKKEPELAAFVFKTAVVLVYKDGSKQKKKLVGSHRLSIYEDWDPFRFRHMIPTEALQVRALASADAEANAVCEIVHVKSESEGRPERVFHLCCSSPESRKDFLKAVHSILRDKHRRQLLKTESLPSSQQYVPFGGKRLCALKGARPAMSRAVSAPSKSLGRRRRRLARNRFTIDSDAVSASSPEKESQQPPGGGDTDRWVEEQFDLAQYEEQDDIKETDILSDDDEFCESVKGASVDRDLQERLQATSISQRERGRKTLDSHASRMAQLKKQAALSGINGGLESASEEVIWVRREDFAPSRKLNTEI

SEQ ID NO: 4759 - protein, 728 aa, Homo sapiens
MATPGSEPQPFVPALSVATLHPLHHPHHHHHHHQHHGGTGAPGGAGGGGGGSGGFNLPLNRGLERALEEAANSGGLNLSARKLKEFPRTAAPGHDLSDTVQADLSKNRLVEVPMELCHFVSLEILNLYHNCIRVIPEAIVNLQMLTYLNLSRNQLSALPACLCGLPLKVLIASNNKLGSLPEEIGQLKQLMELDVSCNEITALPQQIGQLKSLRELNVRRNYLKVLPQELVDLPLVKFDFSCNKVLVIPICFREMKQLQVLLLENNPLQSPPAQICTKGKVHIFKYLSIQACQIKTADSLYLHTMERPHLHQHVEDGKKDSDSGVGSDNGDKRLSATEPSDEDTVSLNVPMSNIMEEEQIIKEDSCHRLSPVKGEFHQEFQPEPSLLGDSTNSGEERDQFTDRADGLHSEFMNYKARAEDCEELLRIEEDVHWQTEGIISSSKDQDMDIAMIEQLREAVDLLQDPNGLSTDITERSVLNLYPMGSAEALELQDSALNGQIQLETSPVCEVQSDLTLQSNGSQYSPNEIRENSPAVSPTTNSTAPFGLKPRSVFLRPQRNLESIDPQFTIRRKMEQMREEKELVEQLRESIEMRLKVSLHEDLGAALMDGVVLCHLVNHIRPRSVASIHVPSPAVPKLSMAKCRRNVENFLEACRKLGVPEADLCSPCDILQLDFRHIRKTVDTLLALGEKAPPPTSALRSRDLIGFCLVHILFIVLVYITYHWNALSA

SEQ ID NO: 4760 - protein, 826 aa, Homo sapiens
MWALCSLLRSAAGRTMSQGRTISQAPARRERPRKDPLRHLRTREKRGPSGCSGGPNTVYLQVVAAGSRDSGAALYVFSEFNRYLFNCGEGVQRLMQEHKLKVARLDNIFLTRMHWSNVGGLSGMILTLKETGLPKCVLSGPPQLEKYLEAIKIFSGPLKGIELAVRPHSAPEYEDETMTVYQIPIHSEQRRGKHQPWQSPERPLSRLSPERSSDSELNENEPHLPHGVSQRRGVRDSSLVVAFICKLHLKRGNFLVLKAKEMGLPVGTAAIAPIIAAVKDGKSITHEGREILAEELCTPPDPGAAFVVVECPDESFIQPICENATFQRYQGKADAPVALVVHMAPASVLVDSRYQQWMERFGPDTQHLVLNENCASVHNLRSHKIQTQLNLIHPDIFPLLTSFRCKKEGPTLSVPMVQGECLLKYQLRPRREWQRDAIITCNPEEFIVEALQLPNFQQSVQEYRRSAQDGPAPAEKRSQYPEIIFLGTGSAIPMKIRNVSATLVNISPDTSLLLDCGEGTFGQLCRHYGDQVDRVLGTLAAVFVSHLHADHHTGLPSILLQRERALASLGKPLHPLLVVAPNQLKAWLQQYHNQCQEVLHHISMIPAKCLQEGAEISSPAVERLISSLLRTCDLEEFQTCLVRHCKHAFGCALVHTSGWKVVYSGDTMPCEALVRMGKDATLLIHEATLEDGLEEEAVEKTHSTTSQAISVGMRMNAEFIMLNHFSQRYAKVPLFSPNFSEKVGVAFDHMKVCFGDFPTMPKLIPPLKALFAGDIEEMEERREKRELRQVRAALLSRELAGGLEDGEPQQKRAHTEEPQAKKVRAQ

SEQ ID NO: 4761 - protein, 1257 aa, Homo sapiens
MGATIECWPAQTKYPVPVFSTFVLTGAAGDKVYGAALQFYEAFPRARLSERQARALGLLSAVERGRALGGRAVRSRRAIAVLSRWPAFPAFRAFLTFLYRYSVSGPHRLPLEAHISHFIHNVPFPSPQRPRILVQMSPYDNLLLCQPVSSPLPLSGASFLQLLQSLGPELAITLLLAVLTEHKLLVHSLRPDLLTSVCEALVSMIFPLHWQCPYIPLCPLVLADVLSAPVPFIVGIHSSYFDLHDPPADVICVDLDTNTLFQTEEKKLLSPRTLPRRPYKVLLATLTNLYQQLDQTYTGPEEEASLEFLLTDYEAVCGRRARLEREVQGAFLRFMACLLKGYRVFLRPLTQAPSEGARDVDNLFFLQGFLKSRERSSHKLYSQLLHTQMFSQFIEECSFGSARHAALEFFDSCVEKVHPEQEKPEPTPLVELEELSGSELTVFITPPEEPALPEGSESTPQYCYDGFPELRAELFESLQEQPGALPVPGPSRSAPSSPAPRRTKQEMKVAQRMAQKSAAVPELWARCLLGHCYGLWFLCLPAYVRSAPSRVQALHTAYHVLRQMESGKVVLPDEVCYRVLMQLCSHYGQPVLSVRVMLEMRQAGIVPNTITYGYYNKAVLESKWPSGTPGGRLRWAKLRNVVLGAAQFRQPLRERQQQQQQQQQQQQQQQQEQVSAHQEAGSSQAEPYLERPSPTRPLQRQTTWAGRSLRDPASPPGRLVKSGSLGSARGAQPTVEAGVAHMIEALGVLEPRGSPVPWHDGSLSDLSLTGEEPLPGGSPGGSGSALSAQSTEALEGLSGRGPKAGGRQDEAGTPRRGLGARLQQLLTPSRHSPASRIPPPELPPDLPPPARRSPMDSLLHPRERPGSTASESSASLGSEWDLSESSLSNLSLRRSSERLSDTPGSFQSPSLEILLSSCSLCRACDSLVYDEEIMAGWAPDDSNLNTTCPFCACPFVPLLSVQTLDSRPSVPSPKSAGASGSKDAPVPGGPGPVLSDRRLCLALDEPQLCNGHMGGASRRVESGAWAYLSPLVLRKELESLVENEGSEVLALPELPSAHPIIFWNLLWYFQRLRLPSILPGLVLASCDGPSHSQAPSPWLTPDPASVQVRLLWDVLTPDPNSCPPLYVLWRVHSQIPQRVVWPGPVPASLSLALLESVLRHVGLNEVHKAVGLLLETLGPPPTGLHLQRGIYREILFLTMAALGKDHVDIVAFDKKYKSAFNKLASSMGKEELRHRRAQMPTPKAIDCRKCFGAPPEC

SEQ ID NO: 4762 - protein, 152 aa, Homo sapiens
MPSLSLSCASHCCLNPLFTGSHCLVLQMIFPLHWQCPYIPLCPLVLADVLSAPVPFIVGIHSSYFDLHDPPADVICVDLDTNTLFQTEEKKLLSPRTLPRRPYKVLLATLTNLYQQLDQSEKPGWGGRLGTVIALKPPVCRGLWGARHFLRR

SEQ ID NO: 4763 - protein, 1081 aa, Homo sapiens
MPSLSLSCASHCCLNPLFTGSHCLVLQMIFPLHWQCPYIPLCPLVLADVLSAPVPFIVGIHSSYFDLHDPPADVICVDLDTNTLFQTEEKKLLSPRTLPRRPYKVLLATLTNLYQQLDQTYTGPEEEASLEFLLTDYEAVCGRRARLEREVQGAFLRFMACLLKGYRVFLRPLTQAPSEGARDVDNLFFLQGFLKSRERSSHKLYSQLLHTQMFSQFIEECSFGSARHAALEFFDSCVEKVHPEQEKPEPTPLVELEELSGSELTVFITPPEEPALPEGSESTPQYCYDGFPELRAELFESLQEQPGALPVPGPSRSAPSSPAPRRTKQEMKVAQRMAQKSAAVPELWARCLLGHCYGLWFLCLPAYVRSAPSRVQALHTAYHVLRQMESGKVVLPDEVCYRVLMQLCSHYGQPVLSVRVMLEMRQAGIVPNTITYGYYNKAVLESKWPSGTPGGRLRWAKLRNVVLGAAQFRQPLRERQQQQQQQQQQQQQQQQEQVSAHQEAGSSQAEPYLERPSPTRPLQRQTTWAGRSLRDPASPPGRLVKSGSLGSARGAQPTVEAGVAHMIEALGVLEPRGSPVPWHDGSLSDLSLTGEEPLPGGSPGGSGSALSAQSTEALEGLSGRGPKAGGRQDEAGTPRRGLGARLQQLLTPSRHSPASRIPPPELPPDLPPPARRSPMDSLLHPRERPGSTASESSASLGSEWDLSESSLSNLSLRRSSERLSDTPGSFQSPSLEILLSSCSLCRACDSLVYDEEIMAGWAPDDSNLNTTCPFCACPFVPLLSVQTLDSRPSVPSPKSAGASGSKDAPVPGGPGPVLSDRRLCLALDEPQLCNGHMGGASRRVESGAWAYLSPLVLRKELESLVENEGSEVLALPELPSAHPIIFWNLLWYFQRLRLPSILPGLVLASCDGPSHSQAPSPWLTPDPASVQVRLLWDVLTPDPNSCPPLYVLWRVHSQIPQRVVWPGPVPASLSLALLESVLRHVGLNEVHKAVGLLLETLGPPPTGLHLQRGIYREILFLTMAALGKDHVDIVAFDKKYKSAFNKLASSMGKEELRHRRAQMPTPKAIDCRKCFGAPPEC

SEQ ID NO: 4764 - protein, 59 aa, Homo sapiens [sequence omitted]

SEQ ID NO: 4765 - protein, 59 aa, Homo sapiens [sequence omitted]

SEQ ID NO: 4766 - protein, 516 aa, Homo sapiens
MIEALGVLEPRGSPVPWHDGSLSDLSLTGEEPLPGGSPGGSGSALSAQSTEALEGLSGRGPKAGGRQDEAGTPRRGLGARLQQLLTPSRHSPASRIPPPELPPDLPPPARRSPMDSLLHPRERPGSTASESSASLGSEWDLSESSLSNLSLRRSSERLSDTPGSFQSPSLEILLSSCSLCRACDSLVYDEEIMAGWAPDDSNLNTTCPFCACPFVPLLSVQTLDSRPSVPSPKSAGASGSKDAPVPGGPGPVLSDRRLCLALDEPQLCNGHMGGASRRVESGAWAYLSPLVLRKELESLVENEGSEVLALPELPSAHPIIFWNLLWYFQRLRLPSILPGLVLASCDGPSHSQAPSPWLTPDPASVQVRLLWDVLTPDPNSCPPLYVLWRVHSQIPQRVVWPGPVPASLSLALLESVLRHVGLNEVHKAVGLLLETLGPPPTGLHLQRGIYREILFLTMAALGKDHVDIVAFDKKYKSAFNKLASSMGKEELRHRRAQMPTPKAIDCRKCFGAPPEC

SEQ ID NO: 4767 - protein, 1257 aa, Homo sapiens; identical to SEQ ID NO: 4761

SEQ ID NO: 4768 - protein, 152 aa, Homo sapiens; identical to SEQ ID NO: 4762

SEQ ID NO: 4769 - protein, 1081 aa, Homo sapiens; identical to SEQ ID NO: 4763

SEQ ID NO: 4770 - protein, 59 aa, Homo sapiens [sequence omitted]

SEQ ID NO: 4771 - protein, 59 aa, Homo sapiens [sequence omitted]

SEQ ID NO: 4772 - protein, 516 aa, Homo sapiens; identical to SEQ ID NO: 4766

SEQ ID NO: 4773 - protein, 173 aa, Homo sapiens
MEPGAGHLDGHRAGSPSLRQALCDGSAVMFSSKERGRCTVINFVPLEAPLRSTPRSRQVTEACGGEGRAVPLGSEPEWSVGGMEATLEQHLEDTMKNPSIVGVLCTDSQGLNLGCRGTLSDEHAGVISVLAQQAAKLTSDPTDIPVVCLESDNGNIMIQKHDGITVAVHKMAS

SEQ ID NO: 4774 - protein, 659 aa, Homo sapiens
MQGSSLWLSLTFRSARVLSRARFFEWQSPGLPNTAAMENGTGPYGEERPREVQETTVTEGAAKIAFPSANEVFYNPVQEFNRDLTCAVITEFARIQLGAKGIQIKVPGEKDTQKVVVDLSEQEEEKVELKESENLASGDQPRTAAVGEICEEGLHVLEGLAASGLRSIRFALEVPGLRSVVANDASTRAVDLIRRNVQLNDVAHLVQPSQADARMLMYQHQRVSERFDVIDLDPYGSPATFLDAAVQAVSEGGLLCVTCTDMAVLAGNSGETCYSKYGAMALKSRACHEMALRIVLHSLDLRANCYQRFVVPLLSISADFYVRVFVRVFTGQAKVKASASKQALVFQCVGCGAFHLQRLGKASGVPSGRAKFSAACGPPVTPECEHCGQRHQLGGPMWAEPIHDLDFVGRVLEAVSANPGRFHTSERIRGVLSVITEELPDVPLYYTLDQLSSTIHCNTPSLLQLRSALLHADFRVSLSHACKNAVKTDAPASALWDIMRCWEKECPVKRERLSETSPAFRILSVEPRLQANFTIREDANPSSRQRGLKRFQANPEANWGPRPRARPGGKAADEAMEERRRLLQNKRKEPPEDVAQRAARLKTFPCKRFKEGTCQRGDQCCYSHSPPTPRVSADAAPDCPETSNQTPPGPGAAAGPGID

SEQ ID NO: 4775 - protein, 420 aa, Homo sapiens
MRWRTILLQYCFLLITCLLTALEAVPIDIDKTKVQNIHPVESAKIEPPDTGLYYDEYLKQVIDVLETDKHFREKLQKADIEEIKSGRLSKELDLVSHHVRTKLDELKRQEVGRLRMLIKAKLDSLQDIGMDHQALLKQFDHLNHLNPDKFESTDLDMLIKAATSDLEHYDKTRHEEFKKYEMMKEHERREYLKTLNEEKRKEEESKFEEMKKKHENHPKVNHPGSKDQLKEVWEETDGLDPNDFDPKTFFKLHDVNSDGFLDEQELEALFTKELEKVYDPKNEEDDMVEMEEERLRMREHVMNEVDTNKDRLVTLEEFLKATEKKEFLEPDSWETLDQQQFFTEEELKEYENIIALQENELKKKADELQKQKEELQRQHDQLEAQKLEYHQVIQQMEQKKLQQGIPPSGPAGELKFEPHI

SEQ ID NO: 4776 - protein, 936 aa, Homo sapiens
MTTGLSDQQVVCDLDHRAVEALLQAVRKRMAGASPAVPHERARLTGGAAAVEPACRGGGGAMASLDLPYRCPRCGEHKRFRSLSSLRAHLEYSHTYETLYILSKTNSICDGAAAAAAAAAAASGFPLAPEPAALLAVPGARREVFESTSFQGKEQAAGPSPAAPHLLHHHHHHAPLAHFPGDLVPASLPCEELAEPGLVPAAAARYALREIEIPLGELFARKSVASSACSTPPPGPGPGPCPGPASASPASPSPADVAYEEGLARLKIRALEKLEVDRRLERLSEEVEQKIAGQVGRLQAELERKAAELETARQESARLGREKEELEERASELSRQVDVSVELLASLKQDLVHKEQELSRKQQEVVQIDQFLKETAAREASAKLRLQQFIEELLERADRAERQLQVISSSCGSTPSASLGRGGGGGGAGPNARGPGRMREHHVGPAVPNTYAVSRHGSSPSTGASSRVPAASQSSGCYDSDSLELPRPEEGAPEDSGPGGLGTRAQAANGGSERSQPPRSSGLRRQAIQNWQRRPRRHSTEGEEGDVSDVGSRTTESEAEGPLDAPRPGPAMAGPLSSCRLSARPEGGSGRGRRAERVSPSRSNEVISPEILKMRAALFCIFTYLDTRTLLHAAEVCRDWRFVARHPAVWTRVLLENARVCSKFLAMLAQWCTQAHSLTLQNLKPRQRGKKESKEEYARSTRGCLEAGLESLLKAAGGNLLILRISHCPNILTDRSLWLASCYCRALQAVTYRSATDPVGHEVIWALGAGCREIVSLQVAPLHPCQQPTRFSNRCLQMIGRCWPHLRALGVGGAGCGVQGLASLARNCMRLQVLELDHVSEITQEVAAEVCREGLKGLEMLVLTATPVTPKALLHFNSICRNLKSIVVQIGIADYFKEPSSPEAQKLFEDMVTKLQALRRRPGFSKILHIKVEGGC

SEQ ID NO: 4777 - protein, 520 aa, Homo sapiens
MECPHLSSSVCIAPDSAKFPNGSPSSWCCSVCRSNKSPWVCLTCSSVHCGRYVNGHAKKHYEDAQVPLTNHKKSEKQDKVQHTVCMDCSSYSTYCYRCDDFVVNDTKLGLVQKVREHLQNLENSAFTADRHKKRKLLENSTLNSKLLKVNGSTTAICATGLRNLGNTCFMNAILQSLSNIEQFCCYFKELPAVELRNGKTAGRRTYHTRSQGDNNVSLVEEFRKTLCALWQGSQTAFSPESLFYVVWKIMPNFRGYQQQDAHEFMRYLLDHLHLELQGGFNGVSRSAILQENSTLSASNKCCINGASTVVTAIFGGILQNEVNCLICGTESRKFDPFLDLSLDIPSQFRSKRSKNQENGPVCSLRDCLRSFTDLEELDETELYMCHKCKKKQKSTKKFWIQKLPKVLCLHLKRFHWTAYLRNKVDTYVEFPLRGLDMKCYLLEPENSGPESCLYDLAAVVVHHGSGVGSGHYTAYATHEGRWFHFNDSTVTLTDEETVVKAKAYILFYVEHQAKAGSDKL

SEQ ID NO: 4778 - protein, 1624 aa, Homo sapiens
MAGQGDCCVKVAVRIRPQLSKEKIEGCHICTSVTPGEPQVLLGKDKAFTYDFVFDLDTWQEQIYSTCVSKLIEGCFEGYNATVLAYGQTGAGKTYTMGTGFDMATSEEEQGIIPRAIAHLFGGIAERKRRAQEQGVAGPEFKVSAQFLELYNEEILDLFDSTRDPDTRHRRSNIKIHEDANGGIYTTGVTSRLIHSQEELIQCLKQGALSRTTASTQMNVQSSRSHAIFTIHLCQMRMCTQPDLVNEAVTGLPDGTPPSSEYETLTAKFHFVDLAGSERLKRTGATGERAKEGISINCGLLALGNVISALGDQSKKVVHVPYRDSKLTRLLQDSLGGNSQTIMIACVSPSDRDFMETLNTLKYANRARNIKNKVVVNQDKTSQQISALRAEIARLQMELMEYKAGKRVIGEDGAEGYSDLFRENAMLQKENGALRLRVKAMQEAIDAINNRVTQLMSQEANLLLAKAGDGNEAIGALIQNYIREIEELRTKLLESEAMNESLRRSLSRASARSPYSLGASPAAPAFGGSPASSMEDASEVIRRAKQDLERLKKKEVRQRRKSPEKEAFKKRAKLQQENSEETDENEAEEEEEERDESGCEEEEGREDEDEDSGSEESLVDSDSDPEEKEVNFQADLADLTCEIEIKQKLIDELENSQRRLQTLKHQYEEKLILLQNKIRDTQLERDRVLQNLSTMECYTEEKANKIKADYEKRLREMNRDLQKLQAAQKEHARLLKNQSRYERELKKLQAEVAEMKKAKVALMKQMREEQQRRRLVETKRNREIAQLKKEQRRQEFQIRALESQKRQQEMVLRRKTQEVSALRRLAKPMSERVAGRAGLKPPMLDSGAEVSASTTSSEAESGARSVSSIVRQWNRKINHFLGDHPAPTVNGTRPARKKFQKKGASQSFSKAARLKWQSLERRIIDIVMQRMTIVNLEADMERLIKKREELFLLQEALRRKRERLQAESPEEEKGLQELAEEIEVLAANIDYINDGITDCQATIVQLEETKEELDSTDTSVVISSCSLAEARLLLDNFLKASIDKGLQVAQKEAQIRLLEGRLRQTDMAGSSQNHLLLDALREKAEAHPELQALIYNVQQENGYASTDEEISEFSEGSFSQSFTMKGSTSHDDFKFKSEPKLSAQMKAVSAECLGPPLDISTKNITKSLASLVEIKEDGVGFSVRDPYYRDRVSRTVSLPTRGSTFPRQSRATETSPLTRRKSYDRGQPIRSTDVGFTPPSSPPTRPRNDRNVFSRLTSNQSQGSALDKGIISPVGGAKGARTAPLQCVSMAEGHTKPILCLDATDELLFTGSKDRSCKMWNLVTGQEIAALKGHPNNVVSIKYCSHSGLVFSVSTSYIKVWDIRDSAKCIRTLTSSGQVISGDACAATSTRAITSAQGEHQINQIALSPSGTMLYAASGNAVRIWELSRFQPVGKLTGHIGPVMCLTVTQTASQHDLVVTGSKDHYVKMFELGECVTGTIGPTHNFEPPHYDGIECLAIQGDILFSGSRDNGIKKWDLDQQELIQQIPNAHKDWVCALAFIPGRPMLLSACRAGVIKVWNVDNFTPIGEIKGHDSPINAICTNAKHIFTASSDCRVKLWNYVPGLTPCLPRRVLAIKGRATTLP

SEQ ID NO: 4779 - protein, 58 aa, Homo sapiens
MAGPESDAQYQFTGIKKYFNSYTLTGRMNCVLATYGSIALIVLYFKLRSKKTPAVKAT

SEQ ID NO: 4780 - protein, 79 aa, Homo sapiens
MHPDLSPHLHTEECNVLINLLKECHKNHNILKFFGYCNDVDRELRKCLKNEYVENRTKSREHGIAMRKKLFNPPEESEK

SEQ ID NO: 4781 - protein, 1132 aa, Homo sapiens
MGMACLTMTEMEGTSTSSIYQNGDISGNANSMKQIDPVLQVYLYHSLGKSEADYLTFPSGEYVAEEICIAASKACGITPVYHNMFALMSETERIWYPPNHVFHIDESTRHNVLYRIRFYFPRWYCSGSNRAYRHGISRGAEAPLLDDFVMSYLFAQWRHDFVHGWIKVPVTHETQEECLGMAVLDMMRIAKENDQTPLAIYNSISYKTFLPKCIRAKIQDYHILTRKRIRYRFRRFIQQFSQCKATARNLKLKYLINLETLQSAFYTEKFEVKEPGSGPSGEEIFATIIITGNGGIQWSRGKHKESETLTEQDLQLYCDFPNIIDVSIKQANQEGSNESRVVTIHKQDGKNLEIELSSLREALSFVSLIDGYYRLTADAHHYLCKEVAPPAVLENIQSNCHGPISMDFAISKLKKAGNQTGLYVLRCSPKDFNKYFLTFAVERENVIEYKHCLITKNENEEYNLSGTKKNFSSLKDLLNCYQMETVRSDNIIFQFTKCCPPKPKDKSNLLVFRTNGVSDVPTSPTLQRPTHMNQMVFHKIRNEDLIFNESLGQGTFTKIFKGVRREVGDYGQLHETEVLLKVLDKAHRNYSESFFEAASMMSKLSHKHLVLNYGVCVCGDENILVQEFVKFGSLDTYLKKNKNCINILWKLEVAKQLAWAMHFLEENTLIHGNVCAKNILLIREEDRKTGNPPFIKLSDPGISITVLPKDILQERIPWVPPECIENPKNLNLATDKWSFGTTLWEICSGGDKPLSALDSQRKLQFYEDRHQLPAPKWAELANLINNCMDYEPDFRPSFRAIIRDLNSLFTPDYELLTENDMLPNMRIGALGFSGAFEDRDPTQFEERHLKFLQQLGKGNFGSVEMCRYDPLQDNTGEVVAVKKLQHSTEEHLRDFEREIEILKSLQHDNIVKYKGVCYSAGRRNLKLIMEYLPYGSLRDYLQKHKERIDHIKLLQYTSQICKGMEYLGTKRYIHRDLATRNILVENENRVKIGDFGLTKVLPQDKEYYKVKEPGESPIFWYAPESLTESKFSVASDVWSFGVVLYELFTYIEKSKSPPAEFMRMIGNDKQGQMIVFHLIELLKNNGRLPRPDGCPDEIYMIMTECWNNNVNQRPSFRDLALRVDQIRDNMAG

SEQ ID NO: 4782 - protein, 267 aa, Homo sapiens
MEGDCLSCMKYLMFVFNFFIFLGGACLLAIGIWVMVDPTGFREIVAANPLLLTGAYILLAMGGLLFLLGFLGCCGAVRENKCLLLFFFLFILIIFLAELSAAILAFIFRENLTREFFTKELTKHYQGNNDTDVFSATWNSVMITFGCCGVNGPEDFKFASVFRLLTLDSEEVPEACCRREPQSRDGVLLSREECLLGRSLFLNKQGCYTVILNTFETYVYLAGALAIGVLAIEEERAHSVSQATGILYQLPASPQAFQSPGTLGATA

SEQ ID NO: 4783 - protein, 248 aa, Homo sapiens
MEGDCLSCMKYLMFVFNFFIFLGGACLLAIGIWVMVDPTGFREIVAANPLLLTGAYILLAMGGLLFLLGFLGCCGAVRENKCLLLFFFLFILIIFLAELSAAILAFIFRENLTREFFTKELTKHYQGNNDTDIFSATWNSVMITFGCCGVNGPEDFKFASVFRLLTLDSEEVPEACCRREPQSRDGVLLSREECLLGRSLFLNKQGCYTVILNTFETYVYLAGALAIGVLAIELFAMIFAMCLFRGIQ

SEQ ID NO: 4784 - protein, 1664 aa, Homo sapiens
MAARRGRRDGVAPPPSGGPGPDPGGGARGSGWGSRSQAPYGTLGAVSGGEQVLLHEEAGDSGFVSLSRLGPSLRDKDLEMEELMLQDETLLGTMQSYMDASLISLIEDFGSLGESRLSLEDQNEVSLLTALTEILDNADSENLSPFDSIPDSELLVSPREGSSLHKLLTLSRTPPERDLITPVDPLGPSTGSSRGSGVEMSLPDPSWDFSPPSFLETSSPKLPSWRPPRSRPRWGQSPPPQQRSDGEEEEEVASFSGQILAGELDNCVSSIPDFPMHLACPEEEDKATAAEMAVPAAGDESISSLSELVRAMHPYCLPNLTHLASLEDELQEQPDDLTLPEGCVVLEIVGQAATAGDDLEIPVVVRQVSPGPRPVLLDDSLETSSALQLLMPTLESETEAAVPKVTLCSEKEGLSLNSEEKLDSACLLKPREVVEPVVPKEPQNPPANAAPGSQRARKGRKKKSKEQPAACVEGYARRLRSSSRGQSTVGTEVTSQVDNLQKQPQEELQKESGPLQGKGKPRAWARAWAAALENSSPKNLERSAGQSSPAKEGPLDLYPKLADTIQTNPIPTHLSLVDSAQASPMPVDSVEADPTAVGPVLAGPVPVDPGLVDLASTSSELVEPLPAEPVLINPVLADSAAVDPAVVPISDNLPPVDAVPSGPAPVDLALVDPVPNDLTPVDPVLVKSRPTDPRRGAVSSALGGSAPQLLVESESLDPPKTIIPEVKEVVDSLKIESGTSATTHEARPRPLSLSEYRRRRQQRQAETEERSPQPPTGKWPSLPETPTGLADIPCLVIPPAPAKKTALQRSPETPLEICLVPVGPSPASPSPEPPVSKPVASSPTEQVPSQEMPLLARPSPPVQSVSPAVPTPPSMSAALPFPAGGLGMPPSLPPPPLQPPSLPLSMGPVLPDPFTHYAPLPSWPCYPHVSPSGYPCLPPPPTVPLVSGTPGAYAVPPTCSVPWAPPPAPVSPYSSTCTYGPLGWGPGPQHAPFWSTVPPPPLPPASIGRAVPQPKMESRGTPAGPPENVLPLSMAPPLSLGLPGHGAPQTEPTKVEVKPVPASPHPKHKVSALVQSPQMKALACVSAEGVTVEEPASERLKPETQETRPREKPPLPATKAVPTPRQSTVPKLPAVHPARLRKLSFLPTPRTQGSEDVVQAFISEIGIEASDLSSLLEQFEKSEAKKECPPPAPADSLAVGNSGGVDIPQEKRPLDRLQAPELANVAGLTPPATPPHQLWKPLAAVSLLAKAKSPKSTAQEGTLKPEGVTEAKHPAAVRLQEGVHGPSRVHVGSGDHDYCVRSRTPPKKMPALVIPEVGSRWNVKRHQDITIKPVLSLGPAAPPPPCIAASREPLDHRTSSEQADPSAPCLAPSSLLSPEASPCRNDMNTRTPPEPSAKQRSMRCYRKACRSASPSSQGWQGRRGRNSRSVSSGSNRTSEASSSSSSSSSSSRSRSRSLSPPHKRWRRSSCSSSGRSRRCSSSSSSSSSSSSSSSSSSSSRSRSRSPSPRRRSDRRRRYSSYRSHDHYQRQRVLQKERAIEERRVVFIGKIPGRMTRSELKQRFSVFGEIEECTIHFRVQGDNYGFVTYRYAEEAFAAIESGHKLRQADEQPFDLCFGGRRQFCKRSYSDLDSNREDFDPAPVKSKFDSLDFDTLLKQAQKNLRR

SEQ ID NO: 4785 - protein, 1006 aa, Homo sapiens
MVCSLWVLLLVSSVLALEEVLLDTTGETSEIGWLTYPPGGWDEVSVLDDQRRLTRTFEACHVAGAPPGTGQDNWLQTHFVERRGAQRAHIRLHFSVRACSSLGVSGGTCRETFTLYYRQAEEPDSPDSVSSWHLKRWTKVDTIAADESFPSSSSSSSSSSSAAWAVGPHGAGQRAGLQLNVKERSFGPLTQRGFYVAFQDTGACLALVAVRLFSYTCPAVLRSFASFPETQASGAGGASLVAAVGTCVAHAEPEEDGVGGQAGGSPPRLHCNGEGKWMVAVGGCRCQPGYQPARGDKACQACPRGLYKSSAGNAPCSPCPARSHAPNPAAPVCPCLEGFYRASSDPPEAPCTGPPSAPQELWFEVQGSALMLHWRLPRELGGRGDLLFNVVCKECEGRQEPASGGGGTCHRCRDEVHFDPRQRGLTESRVLVGGLRAHVPYILEVQAVNGVSELSPDPPQAAAINVSTSHEVPSAVPVVHQVSRASNSITVSWPQPDQTNGNILDYQLRYYDQAEDESHSFTLTSETNTATVTQLSPGHIYGFQVRARTAAGHGPYGGKVYFQTLPQGELSSQLPERLSLVIGSILGALAFLLLAAITVLAVVFQRKRRGTGYTEQLQQYSSPGLGVKYYIDPSTYEDPCQAIRELAREVDPAYIKIEEVIGTGSFGEVRQGRLQPRGRREQTVAIQALWAGGAESLQMTFLGRAAVLGQFQHPNILRLEGVVTKSRPLMVLTEFMELGPLDSFLRQREGQFSSLQLVAMQRGVAAAMQYLSSFAFVHRSLSAHSVLVNSHLVCKVARLGHSPQGPSCLLRWAAPEVIAHGKHTTSSDVWSFGILMWEVMSYGERPYWDMSEQEVLNAIEQEFRLPPPPGCPPGLHLLMLDTWQKDRARRPHFDQLVAAFDKMIRKPDTLQAGGDPGERPSQALLTPVALDFPCLDSPQAWLSAIGLECYQDNFSKFGLCTFSDVAQLSLEDLPALGITLAGHQKKLLHHIQLLQQHLRQQGSVEV

SEQ ID NO: 4786 - protein, 525 aa, Homo sapiens
MAAVVLAATRLLRGSGSWGCSRLRFGPPAYRRFSSGGAYPNIPLSSPLPGVPKPVFATVDGQEKFETKVTTLDNGLRVASQNKFGQFCTVGILINSGSRYEAKYLSGIAHFLEKLAFSSTARFDSKDEILLTLEKHGGICDCQTSRDTTMYAVSADSKGLDTVVALLADVVLQPRLTDEEVEMTRMAVQFELEDLNLRPDPEPLLTEMIHEAAYRENTVGLHRFCPTENVAKINREVLHSYLRNYYTPDRMVLAGVGVEHEHLVDCARKYLLGVQPAWGSAEAVDIDRSVAQYTGGIAKLERDMSNVSLGPTPIPELTHIMVGLESCSFLEEDFIPFAVLNMMMGGGGSFSAGGPGKGMFSRLYLNVLNRHHWMYNATSYHHSYEDTGLLCIHASADPRQVREMVEIITKEFILMGGTVDTVELERAKTQLTSMLMMNLESRPVIFEDVGRQVLATRSRKLPHELCTLIRNVKPEDVKRVASKMLRGKPAVAALGDLTDLPTYEHIQTALSSKDGRLPRTYRLFR

SEQ ID NO: 4787 - protein, 493 aa, Homo sapiens
MEFVLKHTAFAHLREVGSFPCTLNPHEAESLALVGAMIDQVLELHPGAQRLHIGCDEVYYLGEGEASRRWLQQEQNSTGKLCLSHMRAVASGVKARRPSVTPLVWDDMLRDLPEDQLAASGVPQLVEPVLWDYTADLDVYGKVLLMQKYRRCGFPQLWAASAFKGATGPSQAVPPVEHHLRNHVQWLQVAGSGPTDSLQGIILTGWQRYDHYSVLCELLPAGVPSLAACLQLLLRGGFDEDVKAKVENLLGISSLEKTDPVRQAPCSPPCPLLPLPFPRPWRQLFSAGLSAGRGPAPSLAATSLPLSHKSASICAALWMRCWRATGMSLAGSAPTTASGSSSTRSWFSTSSPQRSASWHSGAPSCRSWRLPCSWLSTRMPWRSGWRKTCTPACSGCKLCCRTSARCLPPRCHPPALAGTLLRTPEGRAHARGLLLEAGGALHCQMAWAIRAHVGVVPSGPAVSCPHSVPEGPGQPLGERLENTEGSSTGRPAL

SEQ ID NO: 4788 - protein, 651 aa, Homo sapiens
MNKLRQSFRRKKDVYVPEASRPHQWQTDEEGVRTGKCSFPVKYLGHVEVDESRGMHICEDAVKRLKAERKFFKGFFGKTGKKAVKAVLWVSADGLRVVDEKTKDLIVDQTIEKVSFCAPDRNFDRAFSYICRDGTTRRWICHCFMAVKDTGERLSHAVGCAFAACLERKQKREKECGVTATFDASRTTFTREGSFRVTTATEQAEREEIMKQMQDAKKAETDKIVVGSSVAPGNTAPSPSSPTSPTSDATTSLEMNNPHAIPRRHAPIEQLARQGSFRGFPALSQKMSPFKRQLSLRINELPSTMQRKTDFPIKNAVPEVEGEAESISSLCSQITNAFSTPEDPFSSAPMTKPVTVVAPQSPTFQANGTDSAFHVLAKPAHTALAPVAMPVRETNPWAHAPDAANKEIAATCSGTEWGQSSGAASPGLFQAGHRRTPSEADRWLEEVSKSVRAQQPQASAAPLQPVLQPPPPTAISQPASPFQGNAFLTSQPVPVGVVPALQPAFVPAQSYPVANGMPYPAPNVPVVGITPSQMVANVFGTAGHPQAAHPHQSPSLVRQQTFPHYEASSATTSPFFKPPAQHLNGSAAFNGVDDGRLASADRHTEVPTGTCPVDPFEAQWAALENKSKQRTNPSPTNPFSSDLQKTFEIEL

SEQ ID NO: 4789 - protein, 603 aa, Homo sapiens
MNKLRQSFRRKKDVYVPEASRPHQWQTDEEGVRTGKCSFPVKYLGHVEVDESRGMHICEDAVKRLKAERKFFKGFFGKTGKKAVKAVLWVSADGLRVVDEKTKDLIVDQTIEKVSFCAPDRNFDRAFSYICRDGTTRRWICHCFMAVKDTGERLSHAVGCAFAACLERKQKREKECGVTATFDASRTTFTREGSFRVTTATEQAEREEIMKQMQDAKKAETDKIVVGSSVAPGNTAPSPSSPTSPTSDATTSLEMNNPHAIPRRHAPIEQLARQGSFRGFPALSQKMSPFKRQLSLRINELPSTMQRKTDFPIKNAVPEVEGEAESISSLCSQITNAFSTPEDPFSSAPMTKPVTVVAPQSPTFQGTEWGQSSGAASPGLFQAGHRRTPSEADRWLEEVSKSVRAQQPQASAAPLQPVLQPPPPTAISQPASPFQGNAFLTSQPVPVGVVPALQPAFVPAQSYPVANGMPYPAPNVPVVGITPSQMVANVFGTAGHPQAAHPHQSPSLVRQQTFPHYEASSATTSPFFKPPAQHLNGSAAFNGVDDGRLASADRHTEVPTGTCPVDPFEAQWAALENKSKQRTNPSPTNPFSSDLQKTFEIEL

SEQ ID NO: 4790 - protein, 592 aa, Homo sapiens
MNKLRQSFRRKKDVYVPEASRPHQWQTDEEGVRTGKCSFPVKYLGHVEVDESRGMHICEDAVKRLKATGKKAVKAVLWVSADGLRVVDEKTKDLIVDQTIEKVSFCAPDRNFDRAFSYICRDGTTRRWICHCFMAVKDTGERLSHAVGCAFAACLERKQKREKECGVTATFDASRTTFTREGSFRVTTATEQAEREEIMKQMQDAKKAETDKIVVGSSVAPGNTAPSPSSPTSPTSDATTSLEMNNPHAIPRRHAPIEQLARQGSFRGFPALSQKMSPFKRQLSLRINELPSTMQRKTDFPIKNAVPEVEGEAESISSLCSQITNAFSTPEDPFSSAPMTKPVTVVAPQSPTFQGTEWGQSSGAASPGLFQAGHRRTPSEADRWLEEVSKSVRAQQPQASAAPLQPVLQPPPPTAISQPASPFQGNAFLTSQPVPVGVVPALQPAFVPAQSYPVANGMPYPAPNVPVVGITPSQMVANVFGTAGHPQAAHPHQSPSLVRQQTFPHYEASSATTSPFFKPPAQHLNGSAAFNGVDDGRLASADRHTEVPTGTCPVDPFEAQWAALENKSKQRTNPSPTNPFSSDLQKTFEIEL

SEQ ID NO: 4791 - protein, 640 aa, Homo sapiens
MNKLRQSFRRKKDVYVPEASRPHQWQTDEEGVRTGKCSFPVKYLGHVEVDESRGMHICEDAVKRLKATGKKAVKAVLWVSADGLRVVDEKTKDLIVDQTIEKVSFCAPDRNFDRAFSYICRDGTTRRWICHCFMAVKDTGERLSHAVGCAFAACLERKQKREKECGVTATFDASRTTFTREGSFRVTTATEQAEREEIMKQMQDAKKAETDKIVVGSSVAPGNTAPSPSSPTSPTSDATTSLEMNNPHAIPRRHAPIEQLARQGSFRGFPALSQKMSPFKRQLSLRINELPSTMQRKTDFPIKNAVPEVEGEAESISSLCSQITNAFSTPEDPFSSAPMTKPVTVVAPQSPTFQANGTDSAFHVLAKPAHTALAPVAMPVRETNPWAHAPDAANKEIAATCSGTEWGQSSGAASPGLFQAGHRRTPSEADRWLEEVSKSVRAQQPQASAAPLQPVLQPPPPTAISQPASPFQGNAFLTSQPVPVGVVPALQPAFVPAQSYPVANGMPYPAPNVPVVGITPSQMVANVFGTAGHPQAAHPHQSPSLVRQQTFPHYEASSATTSPFFKPPAQHLNGSAAFNGVDDGRLASADRHTEVPTGTCPVDPFEAQWAALENKSKQRTNPSPTNPFSSDLQKTFEIEL

SEQ ID NO: 4792 - protein, 176 aa, Homo sapiens
MASSSGNDDDLTIPRAAINKMIKETLPNVRVANDARELVVNCCTEFIHLISSEANEICNKSEKKTISPEHVIQALESLGFGSYISEVKEVLQECKTVALKRRKASSRLENLGIPEEELLRQQQELFAKARQQQAELAQQEWLQMQQAAQQAQLAAASASASNQAGSSQDEEDDDDI

SEQ ID NO: 4793 - protein, 320 aa, Homo sapiens
MEAHQCRTGHSNCHEFVEELLESAHSDSAEKRYSQKKVIGFRNSPNDLSQTQQQIKEMKEMYENAEDKVNNSTGKWSCVEERICHLQHENPCIEQQLDDVHQKEDHKEIVTNIQRGFIESGKKDLMLEEKNKKLMNECDHLKESLFQYEREKAERVVVVRQLQQEAADSLKKLTMLESPLEGISHYHINLDETQVPKKKLFQVESQFDDLMVEKEAVSSKCVNLAKENQVFQQKLLSMKKVQQECEKLEEDKKMLEEEILNLKTHMENSMVELSKLQEYKSELDERAMQAVEKLEEIHLQEQAQYKKQLEQLNKDIIQLH

SEQ ID NO: 4794 - protein, 1278 aa, Homo sapiens
MAQSKRHVYSRTPSGSRMSAEASARPLRVGSRVEVIGKGHRGTVAYVGATLFATGKWVGVILDEAKGKNDGTVQGRKYFTCDEGHGIFVRQSQIQVFEDGADTTSPETPDSSASKVLKREGTDTTAKTSKLRGLKPKKAPTARKTTTRRPKPTRPASTGVAGASSSLGPSGSASAGELSSSEPSTPAQTPLAAPIIPTPVLTSPGAVPPLPSPSKEEEGLRAQVRDLEEKLETLRLKRAEDKAKLKELEKHKIQLEQVQEWKSKMQEQQADLQRRLKEARKEAKEALEAKERYMEEMADTADAIEMATLDKEMAEERAESLQQEVEALKERVDELTTDLEILKAEIEEKGSDGAASSYQLKQLEEQNARLKDALVRMRDLSSSEKQEHVKLQKLMEKKNQELEVVRQQRERLQEELSQAESTIDELKEQVDAALGAEEMVEMLTDRNLNLEEKVRELRETVGDLEAMNEMNDELQENARETELELREQLDMAGARVREAQKRVEAAQETVADYQQTIKKYRQLTAHLQDVNRELTNQQEASVERQQQPPPETFDFKIKFAETKAHAKAIEMELRQMEVAQANRHMSLLTAFMPDSFLRPGGDHDCVLVLLLMPRLICKAELIRKQAQEKFELSENCSERPGLRGAAGEQLSFAAGLVYSLSLLQATLHRYEHALSQCSVDVYKKVGSLYPEMSAHERSLDFLIELLHKDQLDETVNVEPLTKAIKYYQHLYSIHLAEQPEDCTMQLADHIKFTQSALDCMSVEVGRLRAFLQGGQEATDIALLLRDLETSCSDIRQFCKKIRRRMPGTDAPGIPAALAFGPQVSDTLLDCRKHLTWVVAVLQEVAAAAAQLIAPLAENEGLLVAALEELAFKASEQIYGTPSSSPYECLRQSCNILISTMNKLATAMQEGEYDAERPPSKPPPVELRAAALRAEITDAEGLGLKLEDRETVIKELKKSLKIKGEELSEANVRLSLLEKKLDSAAKDADERIEKVQTRLEETQALLRKKEKEFEETMDALQADIDQLEAEKAELKQRLNSQSKRTIEGLRGPPPSGIATLVSGIAGEEQQRGAIPGQAPGSVPGPGLVKDSPLLLQQISAMRLHISQLQHENSILKGAQMKASLASLPPLHVAKLSHEGPGSELPAGALYRKTSQLLETLNQLSTHTHVVDITRTSPAAKSPSAQLMEQVAQLKSLSDTVEKLKDEVLKETVSQRPGATVPTDFATFPSSAFLRAKEEQQDDTVYMGKVTFSCAAGFGQRHRLVLTQEQLHQLHSRLIS

SEQ ID NO: 4795 - protein, 1144 aa, Homo sapiens
MMRQAPTARKTTTRRPKPTRPASTGVAGASSSLGPSGSASAGELSSSEPSTPAQTPLAAPIIPTPVLTSPGAVPPLPSPSKEEEGLRAQVRDLEEKLETLRLKRAEDKAKLKELEKHKIQLEQVQEWKSKMQEQQADLQRRLKEARKEAKEALEAKERYMEEMADTADAIEMATLDKEMAEERAESLQQEVEALKERVDELTTDLEILKAEIEEKGSDGAASSYQLKQLEEQNARLKDALVRMRDLSSSEKQEHVKLQKLMEKKNQELEVVRQQRERLQEELSQAESTIDELKEQVDAALGAEEMVEMLTDRNLNLEEKVRELRETVGDLEAMNEMNDELQENARETELELREQLDMAGARVREAQKRVEAAQETVADYQQTIKKYRQLTAHLQDVNRELTNQQEASVERQQQPPPETFDFKIKFAETKAHAKAIEMELRQMEVAQANRHMSLLTAFMPDSFLRPGGDHDCVLVLLLMPRLICKAELIRKQAQEKFELSENCSERPGLRGAAGEQLSFAAGLVYSLSLLQATLHRYEHALSQCSVDVYKKVGSLYPEMSAHERSLDFLIELLHKDQLDETVNVEPLTKAIKYYQHLYSIHLAEQPEDCTMQLADHIKFTQSALDCMSVEVGRLRAFLQGGQEATDIALLLRDLETSCSDIRQFCKKIRRRMPGTDAPGIPAALAFGPQVSDTLLDCRKHLTWVVAVLQEVAAAAAQLIAPLAENEGLLVAALEELAFKASEQIYGTPSSSPYECLRQSCNILISTMNKLATAMQEGEYDAERPPSKPPPVELRAAALRAEITDAEGLGLKLEDRETVIKELKKSLKIKGEELSEANVRLSLLEKKLDSAAKDADERIEKVQTRLEETQALLRKKEKEFEETMDALQADIDQLEAEKAELKQRLNSQSKRTIEGLRGPPPSGIATLVSGIAGEEQQRGAIPGQAPGSVPGPGLVKDSPLLLQQISAMRLHISQLQHENSILKGAQMKASLASLPPLHVAKLSHEGPGSELPAGALYRKTSQLLETLNQLSTHTHVVDITRTSPAAKSPSAQLMEQVAQLKSLSDTVEKLKDEVLKETVSQRPGATVPTDFATFPSSAFLRAKEEQQDDTVYMGKVTFSCAAGFGQRHRLVLTQEQLHQLHSRLIS

SEQ ID NO: 4796 - protein, 919 aa, Homo sapiens [sequence omitted]

SEQ ID NO: 4797 - protein, 979 aa, Homo sapiens
MATQAYTELQAAPPPSQPPQAPPQAQPQPPPPPPPAAPQPPQPPTAAATPQPQYVTELQSPQPQAQPPGGQKQYVTELPAVPAPSQPTGAPTPSPAPQQYIVVTVSEGAMRASETVSEASPGSTASQTGVPTQVVQQVQGTQQRLLVQTSVQAKPGHVSPLQLTNIQVPQQALPTQRLVVQSAAPGSKGGQVSLTVHGTQQVHSPPEQSPVQANSSSSKTAGAPTGTVPQQLQVHGVQQSVPVTQERSVVQATPQAPKPGPVQPLTVQGLQPVHVAQEVQQLQQVPVPHVYSSQVQYVEGGDASYTASAIRSSTYSYPETPLYTQTASTSYYEAAGTATQVSTPATSQAVASSGSMPMYVSGSQVVASSASTGAGASNSSGGGGSGGGGGGGGGGGGGGSGSTGGGGSGAGTYVIQGGYMLGSASQSYSHTTRASPATVQWLLDNYETAEGVSLPRSTLYCHYLLHCQEQKLEPVNAASFGKLIRSVFMGLRTRRLGTRGNSKYHYYGLRIKASSPLLRLMEDQQHMAMRGQPFSQKQRLKPIQKMEGMTNGVAVGQQPSTGLSDISAQVQQYQQFLDASRSLPDFTELDLQGKVLPEGVGPGDIKAFQVLYREHCEAIVDVMVNLQFTLVETLWKTFWRYNLSQPSEAPPLAVHDEAEKRLPKAILVLLSKFEPVLQWTKHCDNVLYQGLVEILIPDVLRPIPSALTQAIRNFAKSLESWLTHAMVNIPEEMLRVKVAAAGAFAQTLRRYTSLNHLAQAARAVLQNTAQINQMLSDLNRVDFANVQEQASWVCRCEDRVVQRLEQDFKVTLQQQNSLEQWAAWLDGVVSQVLKPYQGSAGFPKAAKLFLLKWSFYSSMVIRDLTLRSAASFGSFHLIRLLYDEYMYYLIEHRVAQAKGETPIAVMGEFANLATSLNPLDPDKDEEEEEEEESEDELPQDISLAAGGESPALGPETLEPPAKLARTDARGLFVQALPSS

SEQ ID NO: 4798 - protein, 359 aa, Homo sapiens
MAAVSGLVRRPLREVSGLLKRRFHWTAPAALQVTVRDAINQGMDEELERDEKVFLLGEEVAQYDGAYKVSRGLWKKYGDKRIIDTPISEMGFAGIAVGAAMAGLRPICEFMTFNFSMQAIDQVINSAAKTYYMSGGLQPVPIVFRGPNGASAGVAAQHSQCFAAWYGHCPGLKVVSPWNSEDAKGLIKSAIRDNNPVVVLENELMYGVPFEFLPEAQSKDFLIPIGKAKIERQGTHITVVSHSRPVGHCLEAAAVLSKEGVECEVINMRTIRPMDMETIEASVMKTNHLVTVEGGWPQFGVGAEICARIMEGPAFNFLDAPAVRVTGADVPMPYAKILEDNSIPQVKDIIFAIKKTLNI

SEQ ID NO: 4799 - protein, 709 aa, Homo sapiens
MDQKLSKLVEELTTSGEPRLNPEKMKELKKICKSSEEQLSRAYRLLIAQLTQEHAEIRLSAFQIVEELFVRSHQFRMLVVSNFQEFLELTLGTDPAQPLPPPREAAQRLRQATTRAVEGWNEKFGEAYKKLALGYHFLRHNKKVDFQDTNARSLAERKREEEKQKHLDKIYQERASQAEREMQEMSGEIESCLTEVESCFRLLVPFDFDPNPETESLGMASGMSDALRSSCAGQVGPCRSGTPDPRDGEQPCCSRDLPASAGHPRAGGGAQPSQTATGDPSDEDEDSDLEEFVRSHGLGSHKYTLDVELCSEGLKVQENEDNLALIHAARDTLKLIRNKFLPAVCSWIQRFTRVGTHGGCLKRAIDLKAELELVLRKYKELDIEPEGGERRRTEALGDAEEDEDDEDFVEVPEKEGYEPHIPDHLRPEYGLEAAPEKDTVVRCLRTRTRMDEEVSDPTSAAAQLRQLRDHLPPPSSASPSRALPEPQEAQKLAAERARAPVVPYGVDLHYWGQELPTAGKIVKSDSQHRFWKPSEVEEEVVNADISEMLRSRHITFAGKFEPVQHWCRAPRPDGRLCERQDRLKCPFHGKIVPRDDEGRPLDPEDRAREQRRQLQKQERLEWQDPELMRDVEAATGQDLGSSRYSGKGRGKKRRYPSLTNLKAQADTARARIGRKVFAKAAVRRVVAAMNRMDQKKHEKFSNQFNYALN

SEQ ID NO: 4800 - protein, 1210 aa, Homo sapiens
MAAAAGAAAAAAAEGEAPAEMGALLLEKETRGATERVHGSLGDTPRSEETLPKANPDSLEPAGPSSPASVTVTVGDEGADTPVGATPLIGDESENLEGDGDLRGGRILLGHATKSFPSSPSKGGSCPSRAKMSMTGAGKSPPSVQSLAMRLLSMPGAQGAAAAGSEPPPATTSPEGQPKVHRARKTMSKPGNGQPPVPEKRPPEIQHFRMSDDVHSLGKVTSDLAKRRKLNSGGGLSEELGSARRSGEVTLTKGDPGSLEEWETVVGDDFSLYYDSYSVDERVDSDSKSEVEALTEQLSEEEEEEEEEEEEEEEEEEEEEEEEDEESGNQSDRSGSSGRRKAKKKWRKDSPWVKPSRKRRKREPPRAKEPRGVNGVGSSGPSEYMEVPLGSLELPSEGTLSPNHAGVSNDTSSLETERGFEELPLCSCRMEAPKIDRISERAGHKCMATESVDGELSGCNAAILKRETMRPSSRVALMVLCETHRARMVKHHCCPGCGYFCTAGTFLECHPDFRVAHRFHKACVSQLNGMVFCPHCGEDASEAQEVTIPRGDGVTPPAGTAAPAPPPLSQDVPGRADTSQPSARMRGHGEPRRPPCDPLADTIDSSGPSLTLPNGGCLSAVGLPLGPGREALEKALVIQESERRKKLRFHPRQLYLSVKQGELQKVILMLLDNLDPNFQSDQQSKRTPLHAAAQKGSVEICHVLLQAGANINAVDKQQRTPLMEAVVNNHLEVARYMVQRGGCVYSKEEDGSTCLHHAAKIGNLEMVSLLLSTGQVDVNAQDSGGWTPIIWAAEHKHIEVIRMLLTRGADVTLTDNEENICLHWASFTGSAAIAEVLLNARCDLHAVNYHGDTPLHIAARESYHDCVLLFLSRGANPELRNKEGDTAWDLTPERSDVWFALQLNRKLRLGVGNRAIRTEKIICRDVARGYENVPIPCVNGVDGEPCPEDYKYISENCETSTMNIDRNITHLQHCTCVDDCSSSNCLCGQLSIRCWYDKDGRLLQEFNKIEPPLIFECNQACSCWRNCKNRVVQSGIKVRLQLYRTAKMGWGVRALQTIPQGTFICEYVGELISDAEADVREDDSYLFDLDNKDGEVYCIDARYYGNISRFINHLCDPNIIPVRVFMLHQDLRFPRIAFFSSRDIRTGEELGFDYGDRFWDIKSKYFTCQCGSEKCKHSAEAIALEQSRLARLDPHPELLPELGSLPPVNT

SEQ ID NO: 4801 - protein, 1176 aa, Homo sapiens
MAAAAGAAAAAAAEGEAPAEMGALLLEKETRGATERVHGSLGDTPRSEETLPKANPDSLEPAGPSSPASVTVTVGDEGADTPVGATPLIGDESENLEGDGDLRGGRILLGHATKSFPSSPSKGGSCPSRAKMSMTGAGKSPPSVQSLAMRLLSMPGAQGAAAAGSEPPPATTSPEGQPKVHRARKTMSKPGNGQPPVPEKRPPEIQHFRMSDDVHSLGKVTSDLAKRRKLNSGGGLSEELGSARRSGEVTLTKGDPGSLEEWETVVGDDFSLYYDSYSVDERVDSDSKSEVEALTEQLSEEEEEEEEEEEEEEEEEEEEEEEEDEESGNQSDRSGSSGRRKAKKKWRKDSPWVKPSRKRRKREPPRAKEPRGVSNDTSSLETERGFEELPLCSCRMEAPKIDRISERAGHKCMATESVDGELSGCNAAILKRETMRPSSRVALMVLCETHRARMVKHHCCPGCGYFCTAGTFLECHPDFRVAHRFHKACVSQLNGMVFCPHCGEDASEAQEVTIPRGDGVTPPAGTAAPAPPPLSQDVPGRADTSQPSARMRGHGEPRRPPCDPLADTIDSSGPSLTLPNGGCLSAVGLPLGPGREALEKALVIQESERRKKLRFHPRQLYLSVKQGELQKVILMLLDNLDPNFQSDQQSKRTPLHAAAQKGSVEICHVLLQAGANINAVDKQQRTPLMEAVVNNHLEVARYMVQRGGCVYSKEEDGSTCLHHAAKIGNLEMVSLLLSTGQVDVNAQDSGGWTPIIWAAEHKHIEVIRMLLTRGADVTLTDNEENICLHWASFTGSAAIAEVLLNARCDLHAVNYHGDTPLHIAARESYHDCVLLFLSRGANPELRNKEGDTAWDLTPERSDVWFALQLNRKLRLGVGNRAIRTEKIICRDVARGYENVPIPCVNGVDGEPCPEDYKYISENCETSTMNIDRNITHLQHCTCVDDCSSSNCLCGQLSIRCWYDKDGRLLQEFNKIEPPLIFECNQACSCWRNCKNRVVQSGIKVRLQLYRTAKMGWGVRALQTIPQGTFICEYVGELISDAEADVREDDSYLFDLDNKDGEVYCIDARYYGNISRFINHLCDPNIIPVRVFMLHQDLRFPRIAFFSSRDIRTGEELGFDYGDRFWDIKSKYFTCQCGSEKCKHSAEAIALEQSRLARLDPHPELLPELGSLPPVNT

SEQ ID NO: 4802 - protein, 510 aa, Homo sapiens
MAADSDDGAVSAPAASDGGVSKSTTSGEELVVQVPVVDVQSNNFKEMWPSLLLAIKTANFVAVDTELSGLGDRKSLLNQCIEERYKAVCHAARTRSILSLGLACFKRQPDKGEHSYLAQVFNLTLLCMEEYVIEPKSVQFLIQHGFNFNQQYAQGIPYHKGNDKGDESQSQSVRTLFLELIRARRPLVLHNGLIDLVFLYQNFYAHLPESLGTFTADLCEMFPAGIYDTKYAAEFHARFVASYLEYAFRKCERENGKQRAAGSPHLTLEFCNYPSSMRDHIDYRCCLPPATHRPHPTSICDNFSAYGWCPLGPQCPQSHDIDLIIDTDEAAAEDKRRRRRRREKRKRALLNLPGTQTSGEAKDGPPKKQVCGDSIKPEETEQEVAADETRNLPHSKQGNKNDLEMGIKAARPEIADRATSEVPGSQASPNPVPGGGLHRAGFDAFMTGYVMAYVEVSQGPQPCSSGPWLPECHNKVYLSGKAVPLTVAKSQFSRSSKAHNQKMKLTWGSS

SEQ ID NO: 4803 - protein, 305 aa, Homo sapiens
MDLSGVKKKSLLGVKENNKKSSTRAPSPTKRKDRSDEKSKDRSKDKGATKESSEKDRGRDKTRKRRSASSGSSSTRSRSSSTSSSGSSTSTGSSSGSSSSSASSRSGSSSTSRSSSSSSSSGSPSPSRRRHDNRRRSRSKSKPPKRDEKERKRRSPSPKPTKVHIGRLTRNVTKDHIMEIFSTYGKIKMIDMPVERMHPHLSKGYAYVEFENPDEAEKALKHMDGGQIDGQEITATAVLAPWPRPPPRRFSPPRRMLPPPPMWRRSPPRMRRRSRSPRRRSPVRRRSRSPGRRRHRSRSSSNSSR

SEQ ID NO: 4804 - protein, 305 aa, Homo sapiens; identical to SEQ ID NO: 4803

SEQ ID NO: 4805 - protein, 465 aa, Homo sapiens
MHSSCRQRRNQNLSKEIPQTEFHTGYSMENEPGIVSPFKRVFLKGEKSRDKKAHEKVTERRPLHTVVLSLPERVEPDRLLSDYIEKEVKYLGQLTSIPGYLNPSSRTEILHFIDNAKRAHQLPGHLTQEHDAVLSLSAYNVKLAWRDGEDIILRVPIHDIAAVSYVRDDAAHLVVLKTAQDPGISPSQSLCAESSRGLSAGSLSESAVGPVEACCLVILAAESKVAAEELCCLLGQVFQVVYTESTIDFLDRAIFDGASTPTHHLSLHSDDSSTKVDIKETYEVEASTFCFPESVDVGGASPHSKTISESELSASATELLQDYMLTLRTKLSSQEIQQFAALLHEYRNGASIHEFCINLRQLYGDSRKFLLLGLRPFIPEKDSQHFENFLETIGVKDGRGIITDSFGRHRRALSTTSSSTTNGNRATGSSDDRSAPSEGDEWDRMISDISSDIEALGCSMDQDSA

SEQ ID NO: 4806 - protein, 444 aa, Homo sapiens
MEEEGKKGKKPGIVSPFKRVFLKGEKSRDKKAHEKVTERRPLHTVVLSLPERVEPDRLLSDYIEKEVKYLGQLTSIPGYLNPSSRTEILHFIDNAKRAHQLPGHLTQEHDAVLSLSAYNVKLAWRDGEDIILRVPIHDIAAVSYVRDDAAHLVVLKTAQDPGISPSQSLCAESSRGLSAGSLSESAVGPVEACCLVILAAESKVAAEELCCLLGQVFQVVYTESTIDFLDRAIFDGASTPTHHLSLHSDDSSTKVDIKETYEVEASTFCFPESVDVGGASPHSKTISESELSASATELLQDYMLTLRTKLSSQEIQQFAALLHEYRNGASIHEFCINLRQLYGDSRKFLLLGLRPFIPEKDSQHFENFLETIGVKDGRGIITDSFGRHRRALSTTSSSTTNGNRATGSSDDRSAPSEGDEWDRMISDISSDIEALGCSMDQDSA

SEQ ID NO: 4807 - protein, 407 aa, Homo sapiens
MNNSGADEIGKLFVGGLDWSTTQETLRSYFSQYGEVVDCVIMKDKTTNQSRGFGFVKFKDPNCVGTVLASRPHTLDGRNIDPKPCTPRGMQPERTRPKEGWQKGPRSDNSKSNKIFVGGIPHNCGETELREYFKKFGVVTEVVMIYDAEKQRPRGFGFITFEDEQSVDQAVNMHFHDIMGKKVEVKRAEPRDSKSQAPGQPGASQWGSRVVPNAANGWAGQPPPTWQQGYGPQGMWVPAGQAIGGYGPPPAGRGAPPPPPPFTSYIVSTPPGGFPPPQGFPQGYGAPPQFSFGYGPPPPPPDQFAPPGVPPPPATPGAAPLAFPPPPSQAAPDMSKPPTAQPDFPYGQYAGYGQDLSGFGQGFSDPSQQPPSYGGPSVPGSGGPPAGGSGFGRGQNHNVQGFHPYRR

SEQ ID NO: 4808 - protein, 378 aa, Homo sapiens
MNNSGADEIGKLFVGGLDWSTTQETLRSYFSQYGEVVDCVIMKDKTTNQSRGFGFVKFKDPNCVGTVLASRPHTLDGRNIDPKPCTPRGMQPERTRPKEGWQKGPRSDNSKSNKIFVGGIPHNCGETELREYFKKFGVVTEVVMIYDAEKQRPRGFGFITFEDEQSVDQAVNMHFHDIMGKKVEVKRAEPRDSKSQAPGQPGASQWGSRVVPNAANGWAGQPPPTWQQGYGPQGMWVPAGQAIGGYGPPPAGRGAPPPPPPFTSYIVSTPPGGFPPPQGFPQGYGAPPQFSFGYGPPPPPPDQFAPPGVPPPPATPGAAPLAFPPPPSQAAPDMSKPPTAQPDFPYGQYGLGSYSPAPPGCGPHFVYSLMVRLSSDVA

SEQ ID NO: 4809 - protein, 354 aa, Homo sapiens
MSAFDMSHDFFFCLTSEWEIQPRTKRSSLQQGFLKNQIFTGIQMQTRSYSGWKLCENCGEVFSEQFCLKTHMRAQNGGNTFEGNCYGKDSISVHKEASIGQELSKLNPCGKVFTLTPGLAVHLEILNGRQPYECKECGKGFKYFASLDNHMGIHIGEKLCEFQECERAITTSSHLKQCVAVHTGKKSEKTKNCGKSFTNFSQLSAHAKTHKGEKSFECKECGRSFRNSSSFNVHIQIHTGIKPHKCTECGKAFTRSTHLTQHVRTHTGIKPYECKECGQAFTQYTGLAIHIRNHTGEKPYQCKECGRAFNRSSTLTQHRRIHTGEKPYECVECGKTFITSSHRSKHLKTHSGER

SEQ ID NO: 4810 - protein, 258 aa, Homo sapiens
MVLCVQGPRPLLAVERTGQRPLWAPSLELPKPVMQPLPAGAFLEEVAEGTPAQTESEPKVLDPEEDLLCIAKTFSYLRESGWYWGSITASEARQHLQKMPEGTFLVRDSTHPSYLFTLSVKTTRGPTNVRIEYADSSFRLDSNCLSRPRILAFPDVVSLVQHYVASCTADTRSDSPDPAPTPALPMPKEDAPSDPALPAPPPATAVHLKLVQPFVRRSSARSLQHLCRLVINRLVADVDCLPLPRRMADYLRQYPFQL

SEQ ID NO: 4811 - protein, 439 aa, Homo sapiens
MIEVIMPGVTIYELLFLFLWKWKGPLHPPLPPPHQPQPQQPQQQPPPQHQPPHQPPHQPPPQHQPPPQHPPQHPPQHQHHHHHHHLSVPPPPLMPMSQPQFRPHVQTAQPQASSSRMQCPQRQGLRHNTTSQNVSKRPMQQMQPTAPRNSNLRELPIAPSHVIEMSSSRCSATPSAQVKPIVSASPPSRAVAGSRSSQGKTEVKVKPASPVAQPKEEAKTETEFPDEDEETRLYRLKIEEQKRLREEILKQKELRRQQQAGARKKELLERLAQQQQQLYAPPPPAEQEEQALSPSPTNGNPLLPFPGAQVRQNVKNRLLVKNQDVSISNVQPKTSNFVPSSANMQYQGQQMKALKHLRQTRTVPQSQTQPLHKVLPIKPADVEEPAVPQTPRVASIQGRPQDTKPGVKRTVTHRTNSGGGDGPHISSKVRVIKLSGGVS

SEQ ID NO: 4812 - protein, 148 aa, Homo sapiens
MKVRKCSTPEEIKKRKKAVIFCLSADKKCIIVEEGKEILVGDVGVTITDPFKHFVGMLPEKDCRYALYDASFETKESRKEELMFFLWAPELAPLKSKMIYASSKDAIKKKFQGIKHECQANGPEDLNRACIAEKLGGSLIVAFEGCPV

SEQ ID NO: 4813 - protein, 165 aa, Homo sapiens
MASGVQVADEVCRIFYDMKVRKCSTPEEIKKRKKAVIFCLSADKKCIIVEEGKEILVGDVGVTITDPFKHFVGMLPEKDCRYALYDASFETKESRKEELMFFLWAPELAPLKSKMIYASSKDAIKKKFQGIKHECQANGPEDLNRACIAEKLGGSLIVAFEGCPV

SEQ ID NO: 4814 - protein, 407 aa, Homo sapiens
MTTSGALFPSLVPGSRGASNKYLVEFRAGKMSLKGTTVTPDKRKGLVYIQQTDDSLIHFCWKDRTSGNVEDDLIIFPDDCEFKRVPQCPSGRVYVLKFKAGSKRLFFWMQEPKTDQDEEHCRKVNEYLNNPPMPGALGASGSSGHELSALGGEGGLQSLLGNMSHSQLMQLIGPAGLGGLGGLGALTGPGLASLLGSSGPPGSSSSSSSRSQSAAVTPSSTTSSTRATPAPSAPAAASATSPSPAPSSGNGASTAASPTQPIQLSDLQSILATMNVPAGPAGGQQVDLASVLTPEIMAPILANADVQERLLPYLPSGESLPQTADEIQNTLTSPQFQQALGMFSAALASGQLGPLMCQFGLPAEAVEAANKGDVEAFAKAMQNNAKPEQKEGDTKDKKDEEEDMSLD

SEQ ID NO: 4815 - protein, 407 aa, Homo sapiens; identical to SEQ ID NO: 4814

SEQ ID NO: 4816 - protein, 231 aa, Homo sapiens
MSGEENPASKPTPVQDVQGDGRWMSLHHRFVADSKDKEPEVVFIGDSLVQLMHQCEIWRELFSPLHALNFGIGGDGTQHVLWRLENGELEHIRPKIVVVWVGTNNHGHTAEQVTGGIKAIVQLVNERQPQARVVVLGLLPRGQHPNPLREKNRQVNELVRAALAGHPRAHFLDADPGFVHSDGTISHHDMYDYLHLSRLGYTPVCRALHSLLLRLLAQDQGQGAPLLEPAP

SEQ ID NO: 4817 - protein, 290 aa, Homo sapiens
METPLDVLSRAASLVHADDEKREAALRGEPRMQTLPVASALSSHRTGPPPISPSKRKFSMEPGDEDLDCDNDHVSKMSRIFNPHLNKTANGDCRRDPRERSRSPIERAVAPTMSLHGSHLYTSLPSLGLEQPLALTKNSLDASRPAGLSPTLTPGERQQNRPSVITCASAGARNCNLSHCPIAHSGCAAPGPASYRRPPSAATTCDPVVEEHFRRSLGKNYKEPEPAPNSVSITGSVDDHFAKALGDTWLQIKAAKDGASSSPESASRRGQPASPSAHMVSHSHSPSVVS

SEQ ID NO: 4818 - protein, 924 aa, Homo sapiens
MVSRMGWGGRRRRLGRWGDLGPGSVPLLPMPLPPPPPPSCRGPGGGRISIFSLSPAPHTRSSPSSFSPPTAGPPCSVLQGTGASQSCHSALPIPATPPTQAQPAMTPASASPSWGSHSTPPLAPATPTPSQQCPQDSPGLRVGPLIPEQDYERLEDCDPEGSQDSPIHGEEQQPLLHVPEGLRGSWHHIQNLDSFFTKIYSYHQRNGFACILLEDVFQLGQFIFIVTFTTFLLRCVDYNVLFANQPSNHTRPGPFHSKVTLSDAILPSAQCAERIRSSPLLVLLLVLAAGFWLVQLLRSVCNLFSYWDIQVFYREALHIPPEELSSVPWAEVQSRLLALQRSGGLCVQPRPLTELDIHHRILRYTNYQVALANKGLLPARCPLPWGGSAAFLSRGLALNVDLLLFRGPFSLFRGGWELPHAYKRSDQRGALAARWGRTVLLLAALNLALSPLVLAWQVLHVFYSHVELLRREPGALGARGWSRLARLQLRHFNELPHELRARLARAYRPAAAFLRTAAPPAPLRTLLARQLVFFAGALFAALLVLTVYDEDVLAVEHVLTAMTALGVTATVARSFIPEEQCQGRAPQLLLQTALAHMHYLPEEPGPGGRDRAYRQMAQLLQYRAVSLLEELLSPLLTPLFLLFWFRPRALEIIDFFHHFTVDVAGVGDICSFALMDVKRHGHPQWLSAGQTEASLSQRAEDGKTELSLMRFSLAHPLWRPPGHSSKFLGHLWGRVQQDAAAWGATSARGPSTPGVLSNCTSPLPEAFLANLFVHPLLPPRDLSPTAPCPAAATASLLASISRIAQDPSSVSPGGTGGQKLAQLPELASAEMSLHVIYLHQLHQQQQQQEPWGEAAASILSRPCSSPSQPPSPDEEKPSWSSDGSSPASSPRQQWGTQKARNLFPGGFQVTTDTQKEPDRASCTD

SEQ ID NO: 4819 - protein, 126 aa, Homo sapiens
MPFFGNTFSPKKTPPRKSASLSNLHSLDRSTREVELGLEYGSPTMNLAGQSLKFENGQWIAETGVSGGVDRREVQRLRRRNQQLEEENNLLRLKVDILLDMLSESTAESHLMEKELDELRISRKRK

SEQ ID NO: 4820 - protein, 126 aa, Homo sapiens; identical to SEQ ID NO: 4819

SEQ ID NO: 4821 - protein, 461 aa, Homo sapiens
MSSPTTSSLDTPLPGNGPPQPGAPSSSPTVKEEGPEPWPGGPDPDVPGTDEASSACSTDWVIPDPEEEPERKRKKGPAPKMLGHELCRVCGDKASGFHYNVLSCEGCKGFFRRSVVRGGARRYACRGGGTCQMDAFMRRKCQQCRLRKCKEAGMREQCVLSEEQIRKKKIRKQQQQESQSQSQSPVGPQGSSSSASGPGASPGGSEAGSQGSGEGEGVQLTAAQELMIQQLVAAQLQCNKRSFSDQPKVTPWPLGADPQSRDARQQRFAHFTELAIISVQEIVDFAKQVPGFLQLGREDQIALLKASTIEIMLLETARRYNHETECITFLKDFTYSKDDFHRAGLQVEFINPIFEFSRAMRRLGLDDAEYALLIAINIFSADRPNVQEPGRVEALQQPYVEALLSYTRIKRPQDQLRFPRMLMKLVSLRTLSSVHSEQVFALRLQDKKLPPLLSEIWDVHE

SEQ ID NO: 4822 - protein, 559 aa, Homo sapiens
MRKFAYCKVVLATSLIWVLLDMFLLLYFSECNKCDEKKERGLPAGDVLEPVQKPHEGPGEMGKPVVIPKEDQEKMKEMFKINQFNLMASEMIALNRSLPDVRLEGCKTKVYPDNLPTTSVVIVFHNEAWSTLLRTVHSVINRSPRHMIEEIVLVDDASERDFLKRPLESYVKKLKVPVHVIRMEQRSGLIRARLKGAAVSKGQVITFLDAHCECTVGWLEPLLARIKHDRRTVVCPIIDVISDDTFEYMAGSDMTYGGFNWKLNFRWYPVPQREMDRRKGDRTLPVRTPTMAGGLFSIDRDYFQEIGTYDAGMDIWGGENLEISFRIWQCGGTLEIVTCSHVGHVFRKATPYTFPGGTGQIINKNNRRLAEVWMDEFKNFFYIISPGVTKVDYGDISSRVGLRHKLQCKPFSWYLENIYPDSQIPRHYFSLGEIRNVETNQCLDNMARKENEKVGIFNCHGMGGNQVFSYTANKEIRTDDLCLDVSKLNGPVTMLKCHHLKGNQLWEYDPVKLTLQHVNSNQCLDKATEEDSQVPSIRDCNGSRSQQWLLRNVTLPEIF

SEQ ID NO: 4823 - protein, 200 aa, Homo sapiens
MAKKTYDLLFKLLLIGDSGVGKTCVLFRFSDDAFNTTFISTIGIDFKIKTVELQGKKIKLQIWDTAGQERFHTITTSYYRGAMGIMLVYDITNGKSFENISKWLRNIDEHANEDVERMLLGNKCDMDDKRVVPKGKGGQIAREHGIRFFETSAKANINIEKAFLTLAEDILRKTPVKEPNSENVDISSGGGVTGWKSKCC

SEQ ID NO: 4824 - protein, 199 aa, Homo sapiens
MEARDKQVLRSLRLELGAEVLVEGLVLQYLYQEGILTENHIQEINAQTTGLRKTMLLLDILPSRGPKAFDTFLDSLQEFPWVREKLKKAREEAMTDLPAGDRLTGIPSHILNSSPSDRQINQLAQRLGPEWEPMVLSLGLSQTDIYRCKANHPHNVQSQVVEAFIRWRQRFGKQATFQSLHNGLRAVEVDPSLLLHMLE

SEQ ID NO: 4825 - protein, 854 aa, Homo sapiens
MGMCSRQERIQKDIDVVIQKSRAEKDCLFADFRYSDSTFTFTYVGGPRSVSYSVHVSEDYPDNTYVSSSENDEDVLVTTEPIPVIFHRIATELRKTNDINCCLSIKSKLQKENGEESRQNSTVEEDSEGDNDSEEFYYGGQVNYDGELHKHPQLEADLSAVREIYGPHAVSLREYGAIDDVDIDLHIDVSFLDEEIAVAWEVIRTEPIIVRLHCSLTQYLNGPVPTVDVFQISTKERFGLGHQLKKIMQTFVTQQWKQSKEKSNCLHNKKLSEKKVKSPLHLFSTLRRSPSYPPPGCGKSKSKLKSEQDGISKTHKLLRRTCSSTVKTDDVCVTKSHRTFGRSLSSDPRAEQAMTAIKSHKLLNRPCPAAVKSEECLTLKSHRLLTRSCSGDPRCEHNTNLKPHKLLSRSYSSNLRMEELYGLKNHKLLSKSYSSAPKSSKTELFKEPNAEGRRLSLTSGLIGILTPSSSSSSQLAPNGAKCIPVRDRGFLVQTIEFAEQRIPVLNEYCVVCDEPHVFQNGPMLRPTVCERELCVFAFQTLGVMNEAADEIATGAQVVDLLVSMCRSALESPRKVVIFEPYPSVVDPNDPQMLAFNPRKKNYDRVMKALDSITSIREMTQAPYLEIKKQMDKQDPLAHPLLQWVISSNRSHIVKLPVNRQLKFMHTPHQFLLLSSPPAKESNFRAAKKLFGSTFAFHGSHIENWHSILRNGLVVASNTRLQLHGAMYGSGIYLSPMSSISFGYSGMNKKQKVSAKDEPASSSKSSNTSQSQKKGQQSQFLQSRNLKCIALCEVITSSDLHKHGEIWVVPNTDHVCTRFFFVYEDGQVGDANINTQEGGIHKEILRVIGNQTATG

SEQ ID NO: 4826 - protein, 495 aa, Homo sapiens
MRLTRCQAALAAAITLNLLVLFYVSWLQHQPRNSRARGPRRASAAGPRVTVLVREFEAFDNAVPELVDSFLQQDPAQPVVVAADTLPYPPLALPRIPNVRLALLQPALDRPAAASRPETYVATEFVALVPDGARAEAPGLLERMVEALRAGSARLVAAPVATANPARCLALNVSLREWTARYGAAPAAPRCDALDGDAVVLLRARDLFNLSAPLARPVGTSLFLQTALRGWAVQLLDLTFAAARQPPLATAHARWKAEREGRARRAALLRALGIRLVSWEGGRLEWFGCNKETTRCFGTVVGDTPAYLYEERWTPPCCLRALRETARYVVGVLEAAGVRYWLEGGSLLGAARHGDIIPWDYDVDLGIYLEDVGNCEQLRGAEAGSVVDERGFVWEKAVEGDFFRVQYSESNHLHVDLWPFYPRNGVMTKDTWLDHRQDVEFPEHFLQPLVPLPFAGFVAQAPNNYRRFLELKFGPGVIENPQYPNPALLSLTGSG

SEQ ID NO: 4827 - protein, 306 aa, Homo sapiens
MNGATAAWAPWVRTQRPPEDLGWARSWARGCRGLPSSSATSLRMGTRFSAGTEYMDLQNDLGQTALHLAAILGETSTVEKLYAAGAGLCVAERRGHTALHLACRVGAHACARALLQPRPRRPREAPDTYLAQGPDRTPDTNHTPVALYPDSDLEKEEEESEEDWKLQLEAENYEGHTPLHVAVIHKDVEMVRLLRDAGADLDKPEPTCGRSPLHLAVEAQAADVLELLLRAGANPAARMYGGRTPLGSAMLRPNPILARLLRAHGAPEPEGEDEKSGPCSSSSDSDSGDEGVSQEERQGSPAGGSG

SEQ ID NO: 4828 - protein, 356 aa, Homo sapiens
MAGVACLGKAADADEWCDSGLGSLGPDAAAPGGPGLGAELGPGLSWAPLVFGYVTEDGDTALHLAVIHQHEPFLDFLLGFSAGTEYMDLQNDLGQTALHLAAILGETSTVEKLYAAGAGLCVAERRGHTALHLACRVGAHACARALLQPRPRRPREAPDTYLAQGPDRTPDTNHTPVALYPDSDLEKEEEESEEDWKLQLEAENYEGHTPLHVAVIHKDVEMVRLLRDAGADLDKPEPTCGRSPLHLAVEAQAADVLELLLRAGANPAARMYGGRTPLGSAMLRPNPILARLLRAHGAPEPEGEDEKSGPCSSSSDSDSGDEGDEYDDIVVHSSRSQTRLPPTPASKPLPDDPRPV

SEQ ID NO: 4829 - protein, 246 aa, Homo sapiens
MSRGSSAGFDRHITIFSPEGRLYQVEYAFKAINQGGLTSVAVRGKDCAVIVTQKKVPDKLLDSSTVTHLFKITENIGCVMTGMTADSRSQVQRARYEAANWKYKYGYEIPVDMLCKRIADISQVYTQNAEMRPLGCCMILIGIDEEQGPQVYKCDPAGYYCGFKATAAGVKQTESTSFLEKKVKKKFDWTFEQTVETAITCLSTVLSIDFKPSEIEVGVVTVENPKFRILTEAEIDAHLVALAERD

SEQ ID NO: 4830 - protein, 953 aa, Homo sapiens
MEEQGHSEMEIIPSESHPHIQLLKSNRELLVTHIRNTQCLVDNLLKNDYFSAEDAEIVCACPTQPDKVRKILDLVQSKGEEVSEFFLYLLQQLADAYVDLRPWLLEIGFSPSLLTQSKVVVNTDPVSRYTQQLRHHLGRDSKFVLCYAQKEELLLEEIYMDTIMELVGFSNESLGSLNSLACLLDHTTGILNEQGETIFILGDAGVGKSMLLQRLQSLWATGRLDAGVKFFFHFRCRMFSCFKESDRLCLQDLLFKHYCYPERDPEEVFAFLLRFPHVALFTFDGLDELHSDLDLSRVPDSSCPWEPAHPLVLLANLLSGKLLKGASKLLTARTGIEVPRQFLRKKVLLRGFSPSHLRAYARRMFPERALQDRLLSQLEANPNLCSLCSVPLFCWIIFRCFQHFRAAFEGSPQLPDCTMTLTDVFLLVTEVHLNRMQPSSLVQRNTRSPVETLHAGRDTLCSLGQVAHRGMEKSLFVFTQEEVQASGLQERDMQLGFLRALPELGPGGDQQSYEFFHLTLQAFFTAFFLVLDDRVGTQELLRFFQEWMPPAGAATTSCYPPFLPFQCLQGSGPAREDLFKNKDHFQFTNLFLCGLLSKAKQKLLRHLVPAAALRRKRKALWAHLFSSLRGYLKSLPRVQVESFNQVQAMPTFIWMLRCIYETQSQKVGQLAARGICANYLKLTYCNACSADCSALSFVLHHFPKRLALDLDNNNLNDYGVRELQPCFSRLTVLRLSVNQITDGGVKVLSEELTKYKIVTYLGLYNNQITDVGARYVTKILDECKGLTHLKLGKNKITSEGGKYLALAVKNSKSISEVGMWGNQVGDEGAKAFAEALRNHPSLTTLSLASNGISTEGGKSLARALQQNTSLEILWLTQNELNDEVAESLAEMLKVNQTLKHLWLIQNQITAKGTAQLADALQSNTGITEICLNGNLIKPEEAKVYEDEKRIICF

SEQ ID NO: 4831 - protein, 623 aa, Homo sapiens
MSTQDERQINTEYAVSLLEQLKLFYEQQLFTDIVLIVEGTEFPCHKMVLATCSSYFRAMFMSGLSESKQTHVHLRNVDAATLQIIITYAYTGNLAMNDSTVEQLYETACFLQVEDVLQRCREYLIKKINAENCVRLLSFADLFSCEELKQSAKRMVEHKFTAVYHKDAFMQLSHDLLIDILSSDNLNVEKEETVREAAMLWLEYNTESRSQYLSSVLSQIRIDALSEVTQRAWFQGLPPNDKSVVVQGLYKSMPKFFKPRLGMTKEEMMIFIEASSENPCSLYSSVCYSPQAEKVYKLCSPPADLHKVGTVVTPDNDIYIAGGQVPLKNTKTNHSKTSKLQTAFRTVNCFYWFDAQQNTWFPKTPMLFVRIKPSLVCCEGYIYAIGGDSVGGELNRRTVERYDTEKDEWTMVSPLPCAWQWSAAVVVHDCIYVMTLNLMYCYFPRSDSWVEMAMRQTSRSFASAAAFGDKIFYIGGLHIATNSGIRLPSGTVDGSSVTVEIYDVNKNEWKMAANIPAKRYSDPCVRAVVISNSLCVFMRETHLNERAKYVTYQYDLELDRWSLRQHISERVLWDLGRDFRCTVGKLYPSCLEEYPWKPPTYLFSTDGTEEFELDGEMVALPPV

SEQ ID NO: 4832 - protein, 124 aa, Homo sapiens
MPAPAATYERVVYKNPSEYHYMKVCLEFQDCGVGLNAAQFKQLLISAVKDLFGEVDAALPLDILTYEEKTLSAILRICSSGLVKLWSSLTLLGSYKGKKCAFRVIQVSPFLLALSGNSRELVLD

SEQ ID NO: 4833 - protein, 925 aa, Homo sapiens
MPHKIGFVVVSSSGHEDGFSARELMIHAPTVSGWRSPRFCQFPQEIVLQMVERCRIRKLQLLAHQYMISSKIEFYISESLPEYFAPYQAERFRRLGYVSLCDNEKTGCKARELKSVYVDAVGQFLKLIFHQNHVNKYNIYNQVALVAINIIGDPADFSDESNTASREKLIDHYLGHNSEDPALEGTYARKSDYISPLDDLAFDMYQDPEVAQIIRKLDERKREAVQKERYDYAKKLKQAIADLQKVGERLGRYEVEKRCAVEKEDYDLAKEKKQQMEQYRAEVYEQLELHSLLDAELMRRPFDLPLQPLARSGSPCHQKPMPSLPQLEERGTENQFAEPFLQEKPSSYSLTISPQHSAVDPLLPATDPHPKINAESLPYDERPLPAIRKHYGEAVVEPEMSNADISDARRGGMLGEPEPLTEKALREASSAIDVLGETLVAEAYCKTWSYREDALLALSKKLMEMPVGTPKEDLKNTLRASVFLVRRAIKDIVTSVFQASLKLLKMIITQYIPKHKLSKLETAHCVERTIPVLLTRTGDSSARLRVTAANFIQEMALFKEVKSLQIIPSYLVQPLKANSSVHLAMSQMGLLARLLKDLGTGSSGFTIDNVMKFSVSALEHRVYEVRETAVRIILDMYRQHQASILEYLPPDDSNTRRNILYKTIFEGFAKIDGRATDAEMRARRKAATEEAEKQKKEEIKALQGQLAALKEIQAEVQEKESDAVKPKNQDIQGGKAAPAEALGIPDEHYLDNLCIFCGERSESFTEEGLDLHYWKHCLMLTRCDHCKQVVEISSLTEHLLTECDKKDGFGKCYRCSEAVFKEELPRHIKHKDCNPAKPEKLANRCPLCHENFSPGEEAWKAHLMGPAGCTMNLRKTHILQKAPALQPGKSSAVAASGPLGSKAGSKIPTPKGGLSKSSSRTYAKR

SEQ ID NO: 4834 - protein, 350 aa, Homo sapiens
MAVFVVLLALVAGVLGNEFSILKSPGSVVFRNGNWPIPGERIPDVAALSMGFSVKEDLSWPGLAVGNLFHRPRATVMVMVKGVNKLALPPGSVISYPLENAVPFSLDSVANSIHSLFSEETPVVLQLAPSEERVYMVGKANSVFEDLSVTLRQLRNRLFQENSVLSSLPLNSLSRNNEVDLLFLSELQVLHDISSLLSRHKHLAKDHSPDLYSLELAGLDEIGKRYGEDSEQFRDASKILVDALQKFADDMYSLYGGNAVVELVTVKSFDTSLIRKTRTILEAKQAKNPASPYNLAYKYNFEYSVVFNMVLWIMIALALAVIITSYNIWNMDPGYDSIIYRMTNQKIRMD

SEQ ID NO: 4835 - protein, 63 aa, Homo sapiens
MLGQSIRRFTTSVVRRSHYEEGPGKNLPFSVENKWSLLAKMCLYFGSAFATPFLVVRHQLLKT

SEQ ID NO: 4836 - protein, 386 aa, Homo sapiens
MGLWGQSVPTASSARAGRYPGARTASGTRPWLLDPKILKFVVFIVAVLLPVRVDSATIPRQDEVPQQTVAPQQQRRSLKEEECPAGSHRSEYTGACNPCTEGVDYTIASNNLPSCLLCTVCKSGQTNKSSCTTTRDTVCQCEKGSFQDKNSPEMCRTCRTGCPRGMVKVSNCTPRSDIKCKNESAASSTGKTPAAEETVTTILGMLASPYHYLIIIVVLVIILAVVVVGFSCRKKFISYLKGICSGGGGGPERVHRVLFRRRSCPSRVPGAEDNARNETLSNRYLQPTQVSEQEIQGQELAELTGVTVELPEEPQRLLEQAEAEGCQRRRLLVPVNDADSADISTLLDASATLEEGHAKETIQDQLVGSEKLFYEEDEAGSATSCL

SEQ ID NO: 4837 - protein, 277 aa, Homo sapiens
MSAQAAKVSKKELNSNHDGADETSEKEQQEAIEHIDEVQNEIDRLNEQASEEILKVEQKYNKLRQPFFQKRSELIAKIPNFWVTTFVNHPQVSALLGEEDEEALHYLTRVEVTEFEDIKSGYRIDFYFDENPYFENKVLSKEFHLNESGDPSSKSTEIKWKSGKDLTKRSSQTQNKASRKRQHEEPESFFTWFTDHSDAGADELGEVIKDDIWPNPLQYYLVPDMDDEEGEGEEDDDDDEEEEGLEDIDEEGDEDEGEEDEDDDEGEEGEEDEGEDD

SEQ ID NO: 4838 - protein, 274 aa, Homo sapiens
MLSVAARSGPFAPVLSATSRGVAGALRPLVQATVPATPEQPVLDLKRPFLSRESLSGQAVRRPLVASVGLNVPASVCYSHTDIKVPDFSEYRRLEVLDSTKSSRESSEARKGFSYLVTGVTTVGVAYAAKNAVTQFVSSMSASADVLALAKIEIKLSDIPEGKNMAFKWRGKPLFVRHRTQKEIEQEAAVELSQLRDPQHDLDRVKKPEWVILIGVCTHLGCVPIANAGDFGGYYCPCHGSHYDASGRIRLGPAPLNLEVPTYEFTSDDMVIVG

SEQ ID NO: 4839 - protein, 82 aa, Homo sapiens
MSQAGAQEAPIKKKRPPVKEEDLKGARGNLTKNQEIKSKTYQVMRECEQAGSAAPSVFSRTRTGTETVFEKPKAGPTKSVFG

SEQ ID NO: 4840 - protein, 854 aa, Homo sapiens
MREMAGAWHMTVEQKFGLFSAEIKEADPLAASEASQPKPCPPEVTPHYIWIDFLVQRFEIAKYCSSDQVEIFSSLLQRSMSLNIGGAKGSMNRHVAAIGPRFKLLTLGLSLLHADVVPNATIRNVLREKIYSTAFDYFSCPPKFPTQGEKRLREDISIMIKFWTAMFSDKKYLTASQLVPPDNQDTRSNLDITVGSRQQATQGWINTYPLSSGMSTISKKSGMSKKTNRGSQLHKYYMKRRTLLLSLLATEIERLITWYNPLSAPELELDQAGENSVANWRSKYISLSEKQWKDNVNLAWSISPYLAVQLPARFKNTEAIGNEVTRLVRLDPGAVSDVPEAIKFLVTWHTIDADAPELSHVLCWAPTDPPTGLSYFSSMYPPHPLTAQYGVKVLRSFPPDAILFYIPQIVQALRYDKMGYVREYILWAASKSQLLAHQFIWNMKTNIYLDEEGHQKDPDIGDLLDQLVEEITGSLSGPAKDFYQREFDFFNKITNVSAIIKPYPKGDERKKACLSALSEVKVQPGCYLPSNPEAIVLDIDYKSGTPMQSAAKAPYLAKFKVKRCGVSELEKEGLRCRSDSEDECSTQEADGQKISWQAAIFKVGDDCRQDMLALQIIDLFKNIFQLVGLDLFVFPYRVVATAPGCGVIECIPDCTSRDQLGRQTDFGMYDYFTRQYGDESTLAFQQARYNFIRSMAAYSLLLFLLQIKDRHNGNIMLDKKGHIIHIDFGFMFESSPGGNLGWEPDIKLTDEMVMIMGGKMEATPFKWFMEMCVRGYLAVRPYMDAVVSLVTLMLDTGLPCFRGQTIKLLKHRFSPNMTEREAANFIMKVIQSCFLSNRSRTYDMIQYYQNDIPY

SEQ ID NO: 4841 - protein, 2044 aa, Homo sapiens
MCPVDFHGIFQLDERRRDAVIALGIFLIESDLQHKDCVVPYLLRLLKGLPKVYWVEESTARKGRGALPVAESFSFCLVTLLSDVAYRDPSLRDEILEVLLQVLHVLLGMCQALEIQDKEYLCKYAIPCLIGISRAFGRYSNMEESLLSKLFPKIPPHSLRVLEELEGVRRRSFNDFRSILPSNLLTVCQEGTLKRKTSSVSSISQVSPERGMPPPSSPGGSAFHYFEASCLPDGTALEPEYYFSTISSSFSVSPLFNGVTYKEFNIPLEMLRELLNLVKKIVEEAVLKSLDAIVASVMEANPSADLYYTSFSDPLYLTMFKMLRDTLYYMKDLPTSFVKEIHDFVLEQFNTSQGELQKILHDADRIHNELSPLKLRCQASAACVDLMVWAVKDEQGAENLCIKLSEKLQSKTSSKVIIAHLPLLICCLQGLGRLCERFPVVVHSVTPSLRDFLVIPSPVLVKLYKYHSQYHTVAGNDIKISVTNEHSESTLNVMSGKKSQPSMYEQLRDIAIDNICRCLKAGLTVDPVIVEAFLASLSNRLYISQESDKDAHLIPDHTIRALGHIAVALRDTPKVMEPILQILQQKFCQPPSPLDVLIIDQLGCLVITGNQYIYQEVWNLFQQISVKASSVVYSATKDYKDHGYRHCSLAVINALANIAANIQDEHLVDELLMNLLELFVQLGLEGKRASERASEKGPALKASSSAGNLGVLIPVIAVLTRRLPPIKEAKPRLQKLFRDFWLYSVLMGFAVEGSGLWPEEWYEGVCEIATKSPLLTFPSKEPLRSVLQYNSAMKNDTVTPAELSELRSTIINLLDPPPEVSALINKLDFAMSTYLLSVYRLEYMRVLRSTDPDRFQVMFCYFEDKAIQKDKSGMMQCVIAVADKVFDAFLNMMADKAKTKENEEELERHAQFLLVNFNHIHKRIRRVADKYLSGLVDKFPHLLWSGTVLKTMLDILQTLSLSLSADIHKDQPYYDIPDAPYRITVPDTYEARESIVKDFAARCGMILQEAMKWAPTVTKSHLQEYLNKHQNWVSGLSQHTGLAMATESILHFAGYNKQNTTLGATQLSERPACVKKDYSNFMASLNLRNRYAGEVYGMIRFSGTTGQMSDLNKMMVQDLHSALDRSHPQHYTQAMFKLTAMLISSKDCDPQLLHHLCWGPLRMFNEHGMETALACWEWLLAGKDGVEVPFMREMAGAWHMTVEQKFGLFSAEIKEADPLAASEASQPKPCPPEVTPHYIWIDFLVQRFEIAKYCSSDQVEIFSSLLQRSMSLNIGGAKGSMNRHVAAIGPRFKLLTLGLSLLHADVVPNATIRNVLREKIYSTAFDYFSCPPKFPTQGEKRLREDISIMIKFWTAMFSDKKYLTASQLVPPDNQDTRSNLDITVGSRQQATQGWINTYPLSSGMSTISKKSGMSKKTNRGSQLHKYYMKRRTLLLSLLATEIERLITWYNPLSAPELELDQAGENSVANWRSKYISLSEKQWKDNVNLAWSISPYLAVQLPARFKNTEAIGNEVTRLVRLDPGAVSDVPEAIKFLVTWHTIDADAPELSHVLCWAPTDPPTGLSYFSSMYPPHPLTAQYGVKVLRSFPPDAILFYIPQIVQALRYDKMGYVREYILWAASKSQLLAHQFIWNMKTNIYLDEEGHQKDPDIGDLLDQLVEEITGSLSGPAKDFYQREFDFFNKITNVSAIIKPYPKGDERKKACLSALSEVKVQPGCYLPSNPEAIVLDIDYKSGTPMQSAAKAPYLAKFKVKRCGVSELEKEGLRCRSDSEDECSTQEADGQKISWQAAIFKVGDDCRQDMLALQIIDLFKNIFQLVGLDLFVFPYRVVATAPGCGVIECIPDCTSRDQLGRQTDFGMYDYFTRQYGDESTLAFQQARYNFIRSMAAYSLLLFLLQIKDRHNGNIMLDKKGHIIHIDFGFMFESSPGGNLGWEPDIKLTDEMVMIMGGKMEATPFKWFMEMCVRGYLAVRPYMDAVVSLVTLMLDTGLPCFRGQTIKLLKHRFSPNMTEREAANFIMKVIQSCFLSNRSRTYDMIQYYQNDIPY

SEQ ID NO: 4842 - protein, 232 aa, Homo sapiens
MAGDVGGRSCTDSELLLHPELLSQEFLLLTLEQKNIAVETDVRVNKDSLTDLYVQHAIPLPQRDLPKNRWGKMMEKKREQHEIKNETKRSSTVDGLRKRPLIVFDGSSTSTSIKVKKTENGDNDRLKPPPQASFTSNAFRKLSNSSSSVSPLILSSNLPVNNKTEHNNNDAKQNHDLTHRKSPSGPVKSPPLSPVGTTPVKLKRAAPKEEAEAMNNLKPPQAKRKIQHVTWP

SEQ ID NO: 4843 - protein, 503 aa, Homo sapiens
MALAPERAAPRVLFGEWLLGEISSGCYEGLQWLDEARTCFRVPWKHFARKDLSEADARIFKAWAVARGRWPPSSRGGGPPPEAETAERAGWKTNFRCALRSTRRFVMLRDNSGDPADPHKVYALSRELCWREGPGTDQTEAEAPAAVPPPQGGPPGPFLAHTHAGLQAPGPLPAPAGDKGDLLLQAVQQSCLADHLLTASWGADPVPTKAPGEGQEGLPLTGACAGGPGLPAGELYGWAVETTPSPGPQPAALTTGEAAAPESPHQAEPYLSPSPSACTAVQEPSPGALDVTIMYKGRTVLQKVVGHPSCTFLYGPPDPAVRATDPQQVAFPSPAELPDQKQLRYTEELLRHVAPGLHLELRGPQLWARRMGKCKVYWEVGGPPGSASPSTPACLLPRNCDTPIFDFRVFFQELVEFRARQRRGSPRYTIYLGFGQDLSAGRPKEKSLVLVKLEPWLCRVHLEGTQREGVSSLDSSSLSLCLSSANSLYDDIECFLMELEQPA

SEQ ID NO: 4844 - protein, 474 aa, Homo sapiens
MALAPERAAPRVLFGEWLLGEISSGCYEGLQWLDEARTCFRVPWKHFARKDLSEADARIFKAWAVARGRWPPSSRGGGPPPEAETAERAGWKTNFRCALRSTRRFVMLRDNSGDPADPHKVYALSRELCWREGPGTDQTEAEAPAAVPPPQGGPPGPFLAHTHAGLQAPGPLPAPAGDKGDLLLQAVQQSCLADHLLTASWGADPVPTKAPGEGQEGLPLTGACAGGEAAAPESPHQAEPYLSPSPSACTAVQEPSPGALDVTIMYKGRTVLQKVVGHPSCTFLYGPPDPAVRATDPQQVAFPSPAELPDQKQLRYTEELLRHVAPGLHLELRGPQLWARRMGKCKVYWEVGGPPGSASPSTPACLLPRNCDTPIFDFRVFFQELVEFRARQRRGSPRYTIYLGFGQDLSAGRPKEKSLVLVKLEPWLCRVHLEGTQREGVSSLDSSSLSLCLSSANSLYDDIECFLMELEQPA

SEQ ID NO: 4845 - protein, 164 aa, Homo sapiens
MALAPERAAPRVLFGEWLLGEISSGCYEGLQWLDEARTCFRVPWKHFARKDLSEADARIFKAWAVARGRWPPSSRGGGPPPEAETAERAGWKTNFRCALRSTRRFVMLRDNSGDPADPHKVYALSRELCWREGPGTDQTEAEAPAAVPPPQAQGSLLGSCTGGQ

SEQ ID NO: 4846 - protein, 516 aa, Homo sapiens
MPVPERPAAGPDSPRPGTRRAAPRVLFGEWLLGEISSGCYEGLQWLDEARTCFRVPWKHFARKDLSEADARIFKAWAVARGRWPPSSRGGGPPPEAETAERAGWKTNFRCALRSTRRFVMLRDNSGDPADPHKVYALSRELCWREGPGTDQTEAEAPAAVPPPQGGPPGPFLAHTHAGLQAPGPLPAPAGDEGDLLLQAVQQSCLADHLLTASWGADPVPTKAPGEGQEGLPLTGACAGGPGLPAGELYGWAVETTPSPGPQPAALTTGEAAAPESPHQAEPYLSPSPSACTAVQEPSPGALDVTIMYKGRTVLQKVVGHPSCTFLYGPPDPAVRATDPQQVAFPSPAELPDQKQLRYTEELLRHVAPGLHLELRGPQLWARRMGKCKVYWEVGGPPGSASPSTPACLLPRNCDTPIFDFRVFFRELVEFRARQRRGSPRYTIYLGFGQDLSAGRPKEKSLVLVKLEPWLCRVHLEGTQREGVSSLDSSSLSLCLSSANSLYDDIECFLMELEQPA

SEQ ID NO: 4847 - protein, 709 aa, Homo sapiens
MATCAEILRSEFPEIDGQVFDYVTGVLHSGSADFESVDDLVEAVGELLQEVSGDSKDDAGIRAVCQRMYNTLRLAEPQSQGNSQVLLDAPIQLSKITENYDCGTKLPGLLKREQSSTVNAKKLEKAEARLKAKQEKRSEKDTLKTSNPLVLEEASASQAGSRKESRLESSGKNKSYDVRIENFDVSFGDRVLLAGADVNLAWGRRYGLVGRNGLGKTTLLKMLATRSLRVPAHISLLHVEQEVAGDDTPALQSVLESDSVREDLLRRERELTAQIAAGRAEGSEAAELAEIYAKLEEIEADKAPARASVILAGLGFTPKMQQQPTREFSGGWRMRLALARALFARPDLLLLDEPTNMLDVRAILWLENYLQTWPSTILVVSHDRNFLNAIATDIIHLHSQRLDGYRGDFETFIKSKQERLLNQQREYEAQQQYRQHIQVFIDRFRYNANRASQVQSKLKMLEKLPELRPVDKESEVVMKFPDGFEKFSPPILQLDEVDFYYDPKHVIFSRLSVSADLESRICVVGENGAGKSTMLKLLLGDLAPVRGIRHAHRNLKIGYFSQHHVEQLDLNVSAVELLARKFPGRPEEEYRHQLGRYGISGELAMRPLASLSGGQKSRVAFAQMTMPCPNFYILDEPTNHLDMETIEALGRALNNFRGGVILVSHDERFIRLVCRELWVCEGGGVTRVEGGFDQYRALLQEQFRREGFL

SEQ ID NO: 4848 - protein, 290 aa, Homo sapiens
MDIEAYLERIGYKKSRNKLDLETLTDILQHQIRAVPFENLNIHCGDAMDLGLEAIFDQVVRRNRGGWCLQVNHLLYWALTTIGFETTMLGGYVYSTPAKKYSTGMIHLLLQVTIDGRNYIVDAGFGRSYQMWQPLELISGKDQPQVPCVFRLTEENGFWYLDQIRREQYIPNEEFLHSDLLEDSKYRKIYSFTLKPRTIEDFESMNTYLQTSPSSVFTSKSFCSLQTPDGVHCLVGFTLTHRRFNYKDNTDLIEFKTLSEEEIEKVLKNIFNISLQRKLVPKHGDRFFTI

SEQ ID NO: 4849 - protein, 350 aa, Homo sapiens [sequence omitted]

SEQ ID NO: 4850 - protein, 2556 aa, Homo sapiens
MPPLLAPLLCLALLPALAARGPRCSQPGETCLNGGKCEAANGTEACVCGGAFVGPRCQDPNPCLSTPCKNAGTCHVVDRRGVADYACSCALGFSGPLCLTPLDNACLTNPCRNGGTCDLLTLTEYKCRCPPGWSGKSCQQADPCASNPCANGGQCLPFEASYICHCPPSFHGPTCRQDVNECGQKPGLCRHGGTCHNEVGSYRCVCRATHTGPNCERPYVPCSPSPCQNGGTCRPTGDVTHECACLPGFTGQNCEENIDDCPGNNCKNGGACVDGVNTYNCRCPPEWTGQYCTEDVDECQLMPNACQNGGTCHNTHGGYNCVCVNGWTGEDCSENIDDCASAACFHGATCHDRVASFYCECPHGRTGLLCHLNDACISNPCNEGSNCDTNPVNGKAICTCPSGYTGPACSQDVDECSLGANPCEHAGKCINTLGSFECQCLQGYTGPRCEIDVNECVSNPCQNDATCLDQIGEFQCICMPGYEGVHCEVNTDECASSPCLHNGRCLDKINEFQCECPTGFTGHLCQYDVDECASTPCKNGAKCLDGPNTYTCVCTEGYTGTHCEVDIDECDPDPCHYGSCKDGVATFTCLCRPGYTGHHCETNINECSSQPCRHGGTCQDRDNAYLCFCLKGTTGPNCEINLDDCASSPCDSGTCLDKIDGYECACEPGYTGSMCNINIDECAGNPCHNGGTCEDGINGFTCRCPEGYHDPTCLSEVNECNSNPCVHGACRDSLNGYKCDCDPGWSGTNCDINNNECESNPCVNGGTCKDMTSGYVCTCREGFSGPNCQTNINECASNPCLNQGTCIDDVAGYKCNCLLPYTGATCEVVLAPCAPSPCRNGGECRQSEDYESFSCVCPTGWQAGQTCEVDINECVLSPCRHGASCQNTHGGYRCHCQAGYSGRNCETDIDDCRPNPCHNGGSCTDGINTAFCDCLPGFRGTFCEEDINECASDPCRNGANCTDCVDSYTCTCPAGFSGIHCENNTPDCTESSCFNGGTCVDGINSFTCLCPPGFTGSYCQHDVNECDSQPCLHGGTCQDGCGSYRCTCPQGYTGPNCQNLVHWCDSSPCKNGGKCWQTHTQYRCECPSGWTGLYCDVPSVSCEVAAQRQGVDVARLCQHGGLCVDAGNTHHCRCQAGYTGSYCEDLVDECSPSPCQNGATCTDYLGGYSCKCVAGYHGVNCSEEIDECLSHPCQNGGTCLDLPNTYKCSCPRGTQGVHCEINVDDCNPPVDPVSRSPKCFNNGTCVDQVGGYSCTCPPGFVGERCEGDVNECLSNPCDARGTQNCVQRVNDFHCECRAGHTGRRCESVINGCKGKPCKNGGTCAVASNTARGFICKCPAGFEGATCENDARTCGSLRCLNGGTCISGPRSPTCLCLGPFTGPECQFPASSPCLGGNPCYNQGTCEPTSESPFYRCLCPAKFNGLLCHILDYSFGGGAGRDIPPPLIEEACELPECQEDAGNKVCSLQCNNHACGWDGGDCSLNFNDPWKNCTQSLQCWKYFSDGHCDSQCNSAGCLFDGFDCQRAEGQCNPLYDQYCKDHFSDGHCDQGCNSAECEWDGLDCAEHVPERLAAGTLVVVVLMPPEQLRNSSFHFLRELSRVLHTNVVFKRDAHGQQMIFPYYGREEELRKHPIKRAAEGWAAPDALLGQVKASLLPGGSEGGRRRRELDPMDVRGSIVYLEIDNRQCVQASSQCFQSATDVAAFLGALASLGSLNIPYKIEAVQSETVEPPPPAQLHFMYVAAAAFVLLFFVGCGVLLSRKRRRQHGQLWFPEGFKVSEASKKKRREPLGEDSVGLKPLKNASDGALMDDNQNEWGDEDLETKKFRFEEPVVLPDLDDQTDHRQWTQQHLDAADLRMSAMAPTPPQGEVDADCMDVNVRGPDGFTPLMIASCSGGGLETGNSEEEEDAPAVISDFIYQGASLHNQTDRTGETALHLAARYSRSDAAKRLLEASADANIQDNMGRTPLHAAVSADAQGVFQILIRNRATDLDARMHDGTTPLILAARLAVEGMLEDLINSHADVNAVDDLGKSALHWAAAVNNVDAAVVLLKNGANKDMQNNREETPLFLAAREGSYETAKVLLDHFANRDITDHMDRLPRDIAQERMHHDIVRLLDEYNLVRSPQLHGAPLGGTPTLSPPLCSPNGYLGSLKPGVQGKKVRKPSSKGLACGSKEAKDLKARRKKSQDGKGCLLDSSGMLSPVDSLESPHGYLSDVASPPLLPSPFQQSPSVPLNHLPGMPDTHLGIGHLNVAAKPEMAALGGGGRLAFETGPPRLSHLPVASGTSTVLGSSSGGALNFTVGGSTSLNGQCEWLSRLQSGMVPNQYNPLRGSVAPGPLSTQAPSLQHGMVGPLHSSLAASALSQMMSYQGLPSTRLATQPHLVQTQQVQPQNLQMQQQNLQPANIQQQQSLQPPPPPPQPHLGVSSAASGHLGRSFLSGEPSQADVQPLGPSSLAVHTILPQESPALPTSLPSSLVPPVTAAQFLTPPSQHSYSSPVDNTPSHQLQVPEHPFLTPSPESPDQWSSSSPHSNVSDWSEGVSSPPTSMQSQIARIPEAFK

SEQ ID NO: 4851 - protein, 178 aa, Homo sapiens
MSEVRLPPLRALDDFVLGSARLAAPDPCDPQRWCHRVINNLLYYQTNYLLCFGIGLALAGYVRPLHTLLSALVVAVALGVLVWAAETRAAVRRCRRSHPAACLAAVLAVGLLVLWVAGGACTFLFSIAGPVLLILVHASLRLRNLKNKIENKIESIGLKRTPMGLLLEALGQEQEAGS

SEQ ID NO: 4852 - protein, 570 aa, Homo sapiens
MSRLEAKKPSLCKSEPLTTERVRTTLSVLKRIVTSCYGPSGRLKQLHNGFGGYVCTTSQSSALLSHLLVTHPILKILTASIQNHVSSFSDCGLFTAILCCNLIENVQRLGLTPTTVIRLNKHLLSLCISYLKSETCGCRIPVDFSSTQILLCLVRSILTSKPACMLTRKETEHVSALILRAFLLTIPENAEGHIILGKSLIVPLKGQRVIDSTVLPGILIEMSEVQLMRLLPIKKSTALKVALFCTTLSGDTSDTGEGTVVVSYGVSLENAVLDQLLNLGRQLISDHVDLVLCQKVIHPSLKQFLNMHRIIAIDRIGVTLMEPLTKMTGTQPIGSLGSICPNSYGSVKDVCTAKFGSKHFFHLIPNEATICSLLLCNRNDTAWDELKLTCQTALHVLQLTLKEPWALLGGGCTETHLAAYIRHKTHNDPESILKDDECTQTELQLIAEAFCSALESVVGSLEHDGGEILTDMKYGHLWSVQADSPCVANWPDLLSQCGCGLYNSQEELNWSFLRSTRRPFVPQSCLPHEAVGSASNLTLDCLTAKLSGLQVAVETANLILDLSYVIEDKN

SEQ ID NO: 4853 - protein, 570 aa, Homo sapiens; identical to SEQ ID NO: 4852

SEQ ID NO: 4854 - protein, 250 aa, Homo sapiens
MVAGSDAGRALGVLSVVCLLHCFGFISCFSQQIYGVVYGNVTFHVPSNVPLKEVLWKKQKDKVAELENSEFRAFSSFKNRVYLDTVSGSLTIYNLTSSDEDEYEMESPNITDTMKFFLYVLESLPSPTLTCALTNGSIEVQCMIPEHYNSHRGLIMYSWDCPMEQCKRNSTSIYFKMENDLPQKIQCTLSNPLFNTTSSIILTTCIPSSGHSRHRYALIPIPLAVITTCIVLYMNGILKCDRKPDRTNSN

SEQ ID NO: 4855 - protein, 104 aa, Homo sapiens
MSHTILLVQPTKRPEGRTYADYESVNECMEGVCKMYEEHLKRMNPNSPSITYDISQLFDFIDDLADLSCLVYRADTQTYQPYNKDWIKEKIYVLLRRQAQQAGK

SEQ ID NO: 4856 - protein, 373 aa, Homo sapiens
MDTLEEVTWANGSTALPPPLAPNISVPHRCLLLLYEDIGTSRVRYWDLLLLIPNVLFLIFLLWKLPSARAKIRITSSPIFITFYILVFVVALVGIARAVVSMTVSTSNAATVADKILWEITRFFLLAIELSVIILGLAFGTWESKSSIKRVLAITTVLSLAYSVTQGTLEILYPDAHLSAEDFNIYGHGGRQFWLVSSCFFFLVYSLVVILPKTPLKERISLPSRRSFYVYAGILALLNLLQGLGSVLLCFDIIEGLCCVDATTFLYFSFFAPLIYVAFLRGFFGSEPKILFSYKCQVDETEEPDVHLPQPYAVARREGLEAAGAAGASAASYSSTQFDSAGGVAYLDDIASMPCHTGSINSTDSERWKAINA

SEQ ID NO: 4857 - protein, 409 aa, Homo sapiens
MGEKPGTRVFKKSSPNCKLTVYLGKRDFVDHLDKVDPVDGVVLVDPDYLKDRKVFVTLTCAFRYGREDLDVLGLSFRKDLFIATYQAFPPVPNPPRPPTRLQDRLLRKLGQHAHPFFFTIPQNLPCSVTLQPGPEDTGKACGVDFEIRAFCAKSLEEKSHKRNSVRLVIRKVQFAPEKPGPQPSAETTRHFLMSDRSLHLEASLDKELYYHGEPLNVNVHVTNNSTKTVKKIKVSVRQYADICLFSTAQYKCPVAQLEQDDQVSPSSTFCKVYTITPLLSDNREKRGLALDGKLKHEDTNLASSTIVKEGANKEVLGILVSYRVKVKLVVSRGGDVSVELPFVLMHPKPHDHIPLPRPQSAAPETDVPVDTNLIEFDTNYATDDDIVFEDFARLRLKGMKDDDYDDQLC

SEQ ID NO: 4858 - protein, 394 aa, Homo sapiens
MGEKPGTRVFKKSSPNCKLTVYLGKRDFVDHLDKVDPVVFVTLTCAFRYGREDLDVLGLSFRKDLFIATYQAFPPVPNPPRPPTRLQDRLLRKLGQHAHPFFFTIPQNLPCSVTLQPGPEDTGKACGVDFEIRAFCAKSLEEKSHKRNSVRLVIRKVQFAPEKPGPQPSAETTRHFLMSDRSLHLEASLDKELYYHGEPLNVNVHVTNNSTKTVKKIKVSVRQYADICLFSTAQYKCPVAQLEQDDQVSPSSTFCKVYTITPLLSDNREKRGLALDGKLKHEDTNLASSTIVKEGANKEVLGILVSYRVKVKLVVSRGGDVSVELPFVLMHPKPHDHIPLPRPQSAAPETDVPVDTNLIEFDTNYATDDDIVFEDFARLRLKGMKDDDYDDQLC

SEQ ID NO: 4859 - protein, 446 aa, Homo sapiens [sequence omitted]

SEQ ID NO: 4860 - protein, 1230 aa, Homo sapiens
MSALCWGRGAAGLKRALRPCGRPGLPGKEGTAGGVCGPRRSSSASPQEQDQDRRKDWGHVELLEVLQARVRQLQAESVSEVVVNRVDVARLPECGSGDGSLQPPRKVQMGAKDATPVPCGRWAKILEKDKRTQQMRMQRLKAKLQMPFQSGEFKALTRRLQVEPRLLSKQMAGCLEDCTRQAPESPWEEQLARLLQEAPGKLSLDVEQAPSGQHSQAQLSGQQQRLLAFFKCCLLTDQLPLAHHLLVVHHGQRQKRKLLTLDMYNAVMLGWARQGAFKELVYVLFMVKDAGLTPDLLSYAAALQCMGRQDQDAGTIERCLEQMSQEGLKLQALFTAVLLSEEDRATVLKAVHKVKPTFSLPPQLPPPVNTSKLLRDVYAKDGRVSYPKLHLPLKTLQCFFEKQLHMELASRVCVVSVEKPTLPSKEVKHARKTLKTLRDQWEKALCRALRETKNRLEREVYEGRFSLYPFLCLLDEREVVRMLLQVLQALPAQGESFTTLARELSARTFSRHVVQRQRVSGQVQALQNHYRKYLCLLASDAEVPEPCLPRQYWEELGAPEALREQPWPLPVQMELGKLLAEMLVQATQMPCSLDKPHRSSRLVPVLYHVYSFRNVQQIGILKPHPAYVQLLEKAAEPTLTFEAVDVPMLCPPLPWTSPHSGAFLLSPTKLMRTVEGATQHQELLETCPPTALHGALDALTQLGNCAWRVNGRVLDLVLQLFQAKGCPQLGVPAPPSEAPQPPEAHLPHSAAPARKAELRRELAHCQKVAREMHSLRAEALYRLSLAQHLRDRVFWLPHNMDFRGRTYPCPPHFNHLGSDVARALLEFAQGRPLGPHGLDWLKIHLVNLTGLKKREPLRKRLAFAEEVMDDILDSADQPLTGRKWWMGAEEPWQTLACCMEVANAVRASDPAAYVSHLPVHQDGSCNGLQHYAALGRDSVGAASVNLEPSDVPQDVYSGVAAQVEVFRRQDAQRGMRVAQVLEGFITRKVVKQTVMTVVYGVTRYGGRLQIEKRLRELSDFPQEFVWEASHYLVRQVFKSLQEMFSGTRAIQHWLTESARLISHMGSVVEWVTPLGVPVIQPYRLDSKVKQIGGGIQSITYTHNGDISRKPNTRKQKNGFPPNFIHSLDSSHMMLTALHCYRKGLTFVSVHDCYWTHAADVSVMNQVCREQFVRLHSEPILQDLSRFLVKRFCSEPQKILEASQLKETLQAVPKPGAFDLEQVKRSTYFFS

SEQ ID NO: 4861 - protein, 975 aa, Homo sapiens
MRLGSGTFATCCVAIEVLGIAVFLRGFFPAPVRSSARAEHGAEPPAPEPSAGASSNWTTLPPPLFSKVVIVLIDALRDDFVFGSKGVKFMPYTTYLVEKGASHSFVAEAKPPTVTMPRIKALMTGSLPGFVDVIRNLNSPALLEDSVIRQAKAAGKRIVFYGDETWVKLFPKHFVEYDGTTSFFVSDYTEVDNNVTRHLDKVLKRGDWDILILHYLGLDHIGHISGPNSPLIGQKLSEMDSVLMKIHTSLQSKERETPLPNLLVLCGDHGMSETGSHGASSTEEVNTPLILISSAFERKPGDIRHPKHVQQTDVAATLAIALGLPIPKDSVGSLLFPVVEGRPMREQLRFLHLNTVQLSKLLQENVPSYEKDPGFEQFKMSERLHGNWIRLYLEEKHSEVLFNLGSKVLRQYLDALKTLSLSLSAQVAQYDIYSMMVLTLLLLSVPQALRRKAELEVPLSSPGFSLLFYLVILVLSAVHVIVCTSAESSCYFCGLSWLAAGGVMVLASALLCVIVSVLTNVLVGGNTPRKNPMHPSSRWSELDLLILLGTAGHVLSLGASSFVEEEHQTWYFLVNTLCLALSQETYRNYFLGDDGEPPCGLCVEQGHDGATAAWQGGPGCDVLERDKGHGSPSTSEVLRGREKWMVLASPWLILACCRLLRSLNQTGVQWAHRPDLGHWLTSSDHKAELSVLAALSLLVVFVLVQRGCSPVSKAALALGLLGVYCYRAAIGSVRFPWRPDSKDISKGIIEARFVYVFVLGILFTGTKDLLKSQVIAADFKLKTVGLWEIYSGLVLLAALLFRPHNLPVLAFSLLIQTLMTKFIWKPLRHDAAEITVMHYWFGQAFFYFQGNSNNIATVDISAGFVGLDTYVEIPAVLLTALGTYAGPVLWASHLVHFLSSETRSGSALSHACFCYALICSIPVFTYIVLVTSLRYHLFIWSVFSPKLLYEGMHLLITAAVCVFFTAMDQTRLTQS

SEQ ID NO: 4862 - protein, 417 aa, Homo sapiens
MAVEELQSIIKRCQILEEQDFKEEDFGLFQLAGQRCIEEGHTDQLLEIIQNEKNKVIIKNMGWNLVGPVVRCLLCKDKEDSKRKVYFLIFDLLVKLCNPKELLLGLLELIEEPSGKQISQSILLLLQPLQTVIQKLHNKAYSIGLALSTLWNQLSLLPVPYSKEQIQMDDYGLCQCCKALIEFTKPFVEEVIDNKENSLENEKLKDELLKFCFKSLKCPLLTAQFFEQSEEGGNDPFRYFASEIIGFLSAIGHPFPKMIFNHGRKKRTWNYLEFEEEENKQLADSMASLAYLVFVQGIHIDQLPMVLSPLYLLQFNMGHIEVFLQRTEESVISKGLELLENSLLRIEDNSLLYQYLEIKSFLTVPQGLVKVMTLCPIETLRKKSLAMLQLYINKLDSQGKYTLFREHVTTNGLQDHS

SEQ ID NO: 4863 - protein, 594 aa, Homo sapiens
MAVEELQSIIKRCQILEEQDFKEEDFGLFQLAGQRCIEEGHTDQLLEIIQNEKNKVIIKNMGWNLVGPVVRCLLCKDKEDSKRKVYFLIFDLLVKLCNPKELLLGLLELIEEPSGKQISQSILLLLQPLQTVIQKLHNKAYSIGLALSTLWNQLSLLPVPYSKEQIQMDDYGLCQCCKALIEFTKPFVEEVIDNKENSLENEKLKDELLKFCFKSLKCPLLTAQFFEQSEEGGNDPFRYFASEIIGFLSAIGHPFPKMIFNHGRKKRTWNYLEFEEEENKQLADSMASLAYLVFVQGIHIDQLPMVLSPLYLLQFNMGHIEVFLQRTEESVISKGLELLENSLLRIEDNSLLYQYLEIKSFLTVPQGLVKVMTLCPIETLRKKSLAMLQLYINKLDSQGKYTLFRCLLNTSNHSGVEAFIIQNIKNQIDMSLKRTRNNKWFTGPQLISLLDLVLFLPEGAETDLLQNSDRIMASLNLLRYLVIKDNENDNQTGLWTELGNIENNFLKPLHIGLNMSKAHYEAEIKNSQEAQKSKDLCSITVSGEEIPNMPPEMQLKVLHSALFTFDLIESVLARVEELIEIKTKSTSEENIGIK

SEQ ID NO: 4864 - protein, 257 aa, Homo sapiens
MEFPDLGAHCSEPSCQRLDFLPLKCDACSGIFCADHVAYAQHHCGSAYQKDIQVPVCPLCNVPVPVARGEPPDRAVGEHIDRDCRSDPAQQKRKIFTNKCERAGCRQREMMKLTCERCSRNFCIKHRHPLDHDCSGEGHPTSRAGLAAISRAQAVASTSTVPSPSQTMPSCTSPSRATTRSPSWTAPPVIALQNGLSEDEALQRALEMSLAETKPQVPSCQEEEDLALAQALSASEAEYQRQQAQSRSSKPSNCSLC

SEQ ID NO: 4865 - protein, 670 aa, Homo sapiens
MIASCLCYLLLPATRLFRALSDAFFTCRKNVLLANSSSPQVEGDFAMAPRGPEQEECEGLLQQWREEGLSQVLSTASEGPLIDKGLAQSSLALLMDNPGEENAASEDRWSSRQLSDLRAAENLDEPFPEMLGEEPLLEVEGVEGSMWAAIPMQSEPQYADCAALPVGALATEQWEEDPAVLAWSIAPEPVPQEEASIWPFEGLGQLQPPAVEIPYHEILWREWEDFSTQPDAQGLKAGDGPQFQFTLMSYNILAQDLMQQSSELYLHCHPDILNWNYRFVNLMQEFQHWDPDILCLQEVQEDHYWEQLEPSLRMMGFTCFYKRRTGCKTDGCAVCYKPTRFRLLCASPVEYFRPGLELLNRDNVGLVLLLQPLVPEGLGQVSVAPLCVANTHILYNPRRGDVKLAQMAILLAEVGKVARLSDGSHCPIILCGDLNSVPDSPLYNFIRDGELQYHGMPAWKVSGQEDFSHQLYQRKLQAPLWPSSLGITDCCQYVTSCHPKRSERRKYGRDFLLRFRFCSIACQRPVGLVLMEGVTDTKPERPAGWAESVLEEDASELEPAFSRTVGTIQHCLHLTSVYTHFLPQRGRPEVTTMPLGLGMTVDYIFFSAESCENGNRTDHRLYRDGTLKLLGRLSLLSEEILWAANGLPNPFCSSDHLCLLASFGMEVTAP

SEQ ID NO: 4866 - protein, 443 aa, Homo sapiens
MVRGRISRLSVRDVRFPTSLGGHGADAMHTDPDYSAAYVVIETDAEDGIKGCGITFTLGKGTEVVVCAVNALAHHVLNKDLKDIVGDFRGFYRQLTSDGQLRWIGPEKGVVHLATAAVLNAVWDLWAKQEGKPVWKLLVDMDPRMLVSCIDFRYITDVLTEEDALEILQKGQIGKKEREKQMLAQGYPAYTTSCAWLGYSDDTLKQLCAQALKDGWTRFKVKVGADLQDDMRRCQIIRDMIGPEKTLMMDANQRWDVPEAVEWMSKLAKFKPLWIEEPTSPDDILGHATISKALVPLGIGIATGEQCHNRVIFKQLLQAKALQFLQIDSCRLGSVNENLSVLLMAKKFEIPVCPHAGGVGLCELVQHLIIFDYISVSASLENRVCEYVDHLHEHFKYPVMIQRASYMPPKDPGYSTEMKEESVKKHQYPDGEVWKKLLPAQEN

SEQ ID NO: 4867 - protein, 157 aa, Homo sapiens
MHPWLGSALGFPKCRGIHLCACGNGWTPGETLSQNKTEITKNKVTCWRPHGCEPNTGLGYQGSHTSKYTLLPWNLLKTKPLPPSHGKEGGKEAKVPSGDNSGRGEVPRAQEGQAACGRAASGDSQEGMRRGYEERATAQRPAVRSAETTAHGTWIYP

SEQ ID NO: 4868 - protein, 606 aa, Homo sapiens
MAADVSVTHRPPLSPKSGAEVEAGDAAERRAPEEELPPLDPEEIRKRLEHTERQFRNRRKILIRGLPGDVTNQEVHDLLSDYELKYCFVDKYKGTAFVTLLNGEQAEAAINAFHQSRLRERELSVQLQPTDALLCVANLPPSLTQQQFEELVRPFGSLERCFLVYSERTGQSKGYGFAEYMKKDSAARAKSDLLGKPLGPRTLYVHWTDAGQLTPALLHSRCLCVDRLPPGFNDVDALCRALSAVHSPTFCQLACGQDGQLKGFAVLEYETAEMAEEAQQQADGLSLGGSHLRVSFCAPGPPGRSMLAALIAAQATALNRGKGLLPEPNILQLLNNLGPSASLQLLLNPLLHGSAGGKQGLLGAPPAMPLLNGPALSTALLQLALQTQGQKKPGILGDSPLGALQPGAQPANPLLGELPAGGGLPPELPPRRGKPPPLLPSVLGPAGGDREALGLGPPAAQLTPPPAPVGLRGSGLRGPLSHFYSGSPTSYFTSGLQAGLKQSHLSKAIGSSPLGSGEGLLGLSPGPNGHSHLLKVRAGGGDMQGWEAPAPQRPLTRPALPSVSRPHWAARNAALPTCCPRPSPAQKAAMWASTPRASAATTRTPT

SEQ ID NO: 4869 - protein, 279 aa, Homo sapiens
MENSEKTEVVLLACGSFNPITNMHLRLFELAKDYMNGTGRYTVVKGIISPVGDAYKKKGLIPAYHRVIMAELATKNSKWVEVDTWESLQKEWKETLKVLRHHQEKLEASDCDHQQNSPTLERPGRKRKWTETQDSSQKKSLEPKTKAVPKVKLLCGADLLESFAVPNLWKSEDITQIVANYGLICVTRAGNDAQKFIYESDVLWKHRSNIHVVNEWIANDISSTKIRRALRRGQSIRYLVPDLVQEYIEKHNLYSSESEDRNAGVILAPLQRNTAEAKT

SEQ ID NO: 4870 - protein, 108 aa, Homo sapiens
MADPRVRQIKIKTGVVKRLVKEKVMYEKEAKQQEEKIEKMRAEDGENYDIKKQAEILQESRMMIPDCQRRLEAAYLDLQRILENEKDLEEAEEYKEARLVLDSVKLEA

SEQ ID NO: 4871 - protein, 58 aa, Homo sapiens
MAAPVKGNRKQSTEGDALDPPASPKPAGKQNGIQNPISLELTCGRSTKQWRSWGPMSW

SEQ ID NO: 4872 - protein, 594 aa, Homo sapiens
MAAPVKGNRKQSTEGDALDPPASPKPAGKQNGIQNPISLEDSPEAGGEREEEQEREEEQAFLVSLYKFMKERHTPIERVPHLGFKQINLWKIYKAVEKLGAYELVTGRRLWKNVYDELGGSPGSTSAATCTRRHYERLVLPYVRHLKGEDDKPLPTSKPRKQYKMAKENRGDDGATERPKKAKEERRMDQMMPGKTKADAADPAPLPSQEPPRNSTEQQGLASGSSVSFVGASGCPEAYKRLLSSFYCKGTHGIMSPLAKKKLLAQVSKVEALQCQEEGCRHGAEPQASPAVHLPESPQSPKGLTENSRHRLTPQEGLQAPGGSLREEAQAGPCPAAPIFKGCFYTHPTEVLKPVSQHPRDFFSRLKDGVLLGPPGKEGLSVKEPQLVWGGDANRPSAFHKGGSRKGILYPKPKACWVSPMAKVPAESPTLPPTFPSSPGLGSKRSLEEEGAAHSGKRLRAVSPFLKEADAKKCGAKPAGSGLVSCLLGPALGPVPPEAYRGTMLHCPLNFTGTPGPLKGQAALPFSPLVIPAFPAHFLATAGPSPMAAGLMHFPPTSFDSALRHRLCPASSAWHAPPVTTYAAPHFFHLNTKL

SEQ ID NO: 4873 - protein, 119 aa, Homo sapiens
MKLVRFLMKLSHETVTIELKNGTQVHGTITGVDVSMNTHLKAVKMTLKNREPVQLETLSIRGNNIRYFILPDSLPLDTLLVDVEPKVKSKKREAVAGRGRGRGRGRGRGRGRGRGGPRR

SEQ ID NO: 4874 - protein, 589 aa, Homo sapiens
MPPPSPDSENGFYPGLPSSMNPAFFPSFSPVSPHGCTGLSVPTSGGGGGGFGGPFSATAVPPPPPPAMNIPQQQPPPPAAPQQPQSRRSPVSPQLQQQHQAAAAAFLQQRNSYNHHQPLLKQSPWSNHQSSGWGTGSMSWGAMHGRDHRRTGNMGIPGTMNQISPLKKPFSGNVIAPPKFTRSTPSLTPKSWIEDNVFRTDNNSNTLLPLQVRSSLQLPAWGSDSLQDSWCTAAGTSRIDQDRSRMYDSLNMHSLENSLIDIMRAEHDPLKGRLSYPHPGTDNLLMLNGRSSLFPIDDGLLDDGHSDQVGVLNSPTCYSAHQNGERIERFSRKVFVGGLPPDIDEDEITASFRRFGPLVVDWPHKAESKSYFPPKGYAFLLFQEESSVQALIDACIEEDGKLYLCVSSPTIKDKPVQIRPWNLSDSDFVMDGSQPLDPRKTIFVGGVPRPLRAVELAMIMDRLYGGVCYAGIDTDPELKYPKGAGRVAFSNQQSYIAAISARFVQLQHGDIDKRVEVKPYVLDDQMCDECQGARCGGKFAPFFCANVTCLQYYCEFCWANIHSRAGREFHKPLVKEGADRPRQIHFRWN

SEQ ID NO: 4875 - protein, 559 aa, Homo sapiens
MPPPSPDSENGFYPGLPSSMNPAFFPSFSPVSPHGCTGLSVPTSGGGGGGFGGPFSATAVPPPPPPAMNIPQQQPPPPAAPQQPQSRRSPVSPQLQQQHQAAAAAFLQQRNSYNHHQPLLKQSPWSNHQSSGWGTGSMSWGAMHGRDHRRTGNMGIPGTMNQISPLKKPFSGNVIAPPKFTRSTPSLTPKSWIEDNVFRTDNNSNTLLPLQDRSRMYDSLNMHSLENSLIDIMRAEHDPLKGRLSYPHPGTDNLLMLNGRSSLFPIDDGLLDDGHSDQVGVLNSPTCYSAHQNGERIERFSRKVFVGGLPPDIDEDEITASFRRFGPLVVDWPHKAESKSYFPPKGYAFLLFQEESSVQALIDACIEEDGKLYLCVSSPTIKDKPVQIRPWNLSDSDFVMDGSQPLDPRKTIFVGGVPRPLRAVELAMIMDRLYGGVCYAGIDTDPELKYPKGAGRVAFSNQQSYIAAISARFVQLQHGDIDKRVEVKPYVLDDQMCDECQGARCGGKFAPFFCANVTCLQYYCEFCWANIHSRAGREFHKPLVKEGADRPRQIHFRWN

SEQ ID NO: 4876 - protein, 587 aa, Homo sapiens
MASEDIAKLAETLAKTQVAGGQLSFKGKSLKLNTAEDAKDVIKEIEDFDSLEALRLEGNTVGVEAARVIAKALEKKSELKRCHWSDMFTGRLRTEIPPALISLGEGLITAGAQLVELDLSDNAFGPDGVQGFEALLKSSACFTLQELKLNNCGMGIGGGKILAAALTECHRKSSAQGKPLALKVFVAGRNRLENDGATALAEAFRVIGTLEEVHMPQNGINHPGITALAQAFAVNPLLRVINLNDNTFTEKGAVAMAETLKTLRQVEVINFGDCLVRSKGAVAIADAIRGGLPKLKELNLSFCEIKRDAALAVAEAMADKAELEKLDLNGNTLGEEGCEQLQEVLEGFNMAKVLASLSDDEDEEEEEEGEEEEEEAEEEEEEDEEEEEEEEEEEEEEPQQRGQGEKSATPSRKILDPNTGEPAPVLSSPPPADVSTFLAFPSPEKLLRLGPKSSVLIAQQTDTSDPEKVVSAFLKVSSVFKDEATVRMAVQDAVDALMQKAFNSSSFNSNTFLTRLLVHMGLLKSEDKVKAIANLYGPLMALNHMVQQDYFPKALAPLLLAFVTKPNSALESCSFARHSLLQTLYKV

SEQ ID NO: 4877 - protein, 1049 aa, Homo sapiens
MGSRTPESPLHAVQLRWGPRRRPPLLPLLLLLLPPPPRVGGFNLDAEAPAVLSGPPGSFFGFSVEFYRPGTDGVSVLVGAPKANTSQPGVLQGGAVYLCPWGASPTQCTPIEFDSKGSRLLESSLSSSEGEEPVEYKSLQWFGATVRAHGSSILACAPLYSWRTEKEPLSDPVGTCYLSTDNFTRILEYAPCRSDFSWAAGQGYCQGGFSAEFTKTGRVVLGGPGSYFWQGQILSATQEQIAESYYPEYLINLVQGQLQTRQASSIYDDSYLGYSVAVGEFSGDDTEDFVAGVPKGNLTYGYVTILNGSDIRSLYNFSGEQMASYFGYAVAATDVNGDGLDDLLVGAPLLMDRTPDGRPQEVGRVYVYLQHPAGIEPTPTLTLTGHDEFGRFGSSLTPLGDLDQDGYNDVAIGAPFGGETQQGVVFVFPGGPGGLGSKPSQVLQPLWAASHTPDFFGSALRGGRDLDGNGYPDLIVGSFGVDKAVVYRGRPIVSASASLTIFPAMFNPEERSCSLEGNPVACINLSFCLNASGKHVADSIGFTVELQLDWQKQKGGVRRALFLASRQATLTQTLLIQNGAREDCREMKIYLRNESEFRDKLSPIHIALNFSLDPQAPVDSHGLRPALHYQSKSRIEDKAQILLDCGEDNICVPDLQLEVFGEQNHVYLGDKNALNLTFHAQNVGEGGAYEAELRVTAPPEAEYSGLVRHPGNFSSLSCDYFAVNQSRLLVCDLGNPMKAGASLWGGLRFTVPHLRDTKKTIQFDFQILSKNLNNSQSDVVSFRLSVEAQAQVTLNGVSKPEAVLFPVSDWHPRDQPQKEEDLGPAVHHVYELINQGPSSISQGVLELSCPQALEGQQLLYVTRVTGLNCTTNHPINPKGLELDPEGSLHHQQKREAPSRSSASSGPQILKCPEAECFRLRCELGPLHQQESQSLQLHFRVWAKTFLQREHQPFSLQCEAVYKALKMPYRILPRQLPQKERQVATAVQWTKAEGSYGVPLWIIILAILFGLLLLGLLIYILYKLGFFKRSLPYGTAMEKAQLKPPATSDA

SEQ ID NO: 4878 - protein, 523 aa, Homo sapiens
MAAALQVLPRLARAPLHPLLWRGSVARLASSMALAEQARQLFESAVGAVLPGPMLHRALSLDPGGRQLKVRDRNFQLRQNLYLVGFGKAVLGMAAAAEELLGQHLVQGVISVPKGIRAAMERAGKQEMLLKPHSRVQVFEGAEDNLPDRDALRAALAIQQLAEGLTADDLLLVLISGGGSALLPAPIPPVTLEEKQTLTRLLAARGATIQELNTIRKALSQLKGGGLAQAAYPAQVVSLILSDVVGDPVEVIASGPTVASSHNVQDCLHILNRYGLRAALPRSVKTVLSRADSDPHGPHTCGHVLNVIIGSNVLALAEAQRQAEALGYQAVVLSAAMQGDVKSMAQFYGLLAHVARTRLTPSMAGASVEEDAQLHELAAELQIPDLQLEEALETMAWGRGPVCLLAGGEPTVQLQGSGRGGRNQELALRVGAELRRWPLGPIDVLFLSGGTDGQDGPTEAAGAWVTPELASQAAAEGLDIATFLAHNDSHTFFCCLQGGAHLLHTGMTGTNVMDTHLLFLRPR

SEQ ID NO: 4879 - protein, 768 aa, Homo sapiens
MSNLSKGTGSRKDTKMRIRAFPMTMDEKYVNSIWDLLKNAIQEIQRKNNSGLSFEELYRNAYTMVLHKHGEKLYTGLREVVTEHLINKVREDVLNSLNNNFLQTLNQAWNDHQTAMVMIRDILMYMDRVYVQQNNVENVYNLGLIIFRDQVVRYGCIRDHLRQTLLDMIARERKGEVVDRGAIRNACQMLMILGLEGRSVYEEDFEAPFLEMSAEFFQMESQKFLAENSASVYIKKVEARINEEIERVMHCLDKSTEEPIVKVVERELISKHMKTIVEMENSGLVHMLKNGKTEDLGCMYKLFSRVPNGLKTMCECMSSYLREQGKALVSEEGEGKNPVDYIQGLLDLKSRFDRFLLESFNNDRLFKQTIAGDFEYFLNLNSRSPEYLSLFIDDKLKKGVKGLTEQEVETILDKAMVLFRFMQEKDVFERYYKQHLARRLLTNKSVSDDSEKNMISKLKTECGCQFTSKLEGMFRDMSISNTTMDEFRQHLQATGVSLGGVDLTVRVLTTGYWPTQSATPKCNIPPAPRHAFEIFRRFYLAKHSGRQLTLQHHMGSADLNATFYGPVKKEDGSEVGVGGAQVTGSNTRKHILQVSTFQMTILMLFNNREKYTFEEIQQETDIPERELVRALQSLACGKPTQRVLTKEPKSKEIENGHIFTVNDQFTSKLHRVKIQTVAAKQGESDPERKETRQKVDDDRKHEIEAAIVRIMKSRKKMQHNVLVAEVTQQLKARFLPSPVVIKKRIEGLIEREYLARTPEDRKVYTYVA

SEQ ID NO: 4880 - protein, 187 aa, Homo sapiens
MAALCRTRAVAAESHFLRVFLFFRPFRGVGTESGSESGSSNAKEPKTRAGGFASALERHSELLQKVEPLQKGSPKNVESFASMLRHSPLTQMGPAKDKLVIGRIFHIVENDLYIDFGGKFHCVCRRPEVDGEKYQKGTRVRLRLLDLELTSRFLGATTDTTVLEANAVLLGIQESKDSRSKEEHHEK

SEQ ID NO: 4881 - protein, 528 aa, Homo sapiens
MNDHLHVGSHAHGQIQVQQLFEDNSNKRTVLTTQPNGLTTVGKTGLPVVPERQLDSIHRRQGSSTSLKSMEGMGKVKATPMTPEQAMKQYMQKLTAFEHHEIFSYPEIYFLGLNAKKRQGMTGGPNNGGYDDDQGSYVQVPHDHVAYRYEVLKVIGKGSFGQVVKAYDHKVHQHVALKMVRNEKRFHRQAAEEIRILEHLRKQDKDNTMNVIHMLENFTFRNHICMTFELLSMNLYELIKKNKFQGFSLPLVRKFAHSILQCLDALHKNRIIHCDLKPENILLKQQGRSGIKVIDFGSSCYEHQRVYTYIQSRFYRAPEVILGARYGMPIDMWSLGCILAELLTGYPLLPGEDEGDQLACMIELLGMPSQKLLDASKRAKNFVSSKGYPRYCTVTTLSDGSVVLNGGRSRRGKLRGPPESREWGNALKGCDDPLFLDFLKQCLEWDPAVRMTPGQALRHPWLRRRLPKPPTGEKTSVKRITESTGAITSISKLPPPSSSASKLRTNLAQMTDANGNIQQRTVLPKLVS

SEQ ID NO: 4882 - protein, 601 aa, Homo sapiens
MLTRKPSAAAPAAYPTGRGGDSAVRQLQASPGLGAGPTRSGVGTGPPSPIALPPLRASNAAAAAHTIGGSKHTMNDHLHVGSHAHGQIQVQQLFEDNSNKRTVLTTQPNGLTTVGKTGLPVVPERQLDSIHRRQGSSTSLKSMEGMGKVKATPMTPEQAMKQYMQKLTAFEHHEIFSYPEIYFLGLNAKKRQGMTGGPNNGGYDDDQGSYVQVPHDHVAYRYEVLKVIGKGSFGQVVKAYDHKVHQHVALKMVRNEKRFHRQAAEEIRILEHLRKQDKDNTMNVIHMLENFTFRNHICMTFELLSMNLYELIKKNKFQGFSLPLVRKFAHSILQCLDALHKNRIIHCDLKPENILLKQQGRSGIKVIDFGSSCYEHQRVYTYIQSRFYRAPEVILGARYGMPIDMWSLGCILAELLTGYPLLPGEDEGDQLACMIELLGMPSQKLLDASKRAKNFVSSKGYPRYCTVTTLSDGSVVLNGGRSRRGKLRGPPESREWGNALKGCDDPLFLDFLKQCLEWDPAVRMTPGQALRHPWLRRRLPKPPTGEKTSVKRITESTGAITSISKLPPPSSSASKLRTNLAQMTDANGNIQQRTVLPKLVS

SEQ ID NO: 4883 - protein, 83 aa, Homo sapiens
MLRNLLALRQIGQRTISTASRRHFKNKVPEKQKLFQEDDEIPLYLKGGVADALLYRATMILTVGGTAYAIYELAVASFPKKQE

SEQ ID NO: 4884 - protein, 331 aa, Homo sapiens
MFHKAEELFSKTTNNEVDDMDTSDTQWGWFYLAECGKWHMFQPDTNSQCSVSSEDIEKSFKTNPCGSISFTTSKFSYKIDFAEMKQMNLTTGKQRLIKRAPFSISAFSYICENEAIPMPPHWENVNTQVPYQLIPLHNQTHEYNEVANLFGKTMDRNRIKRIQRIQNLDLWEFFCRKKAQLKKKRGVPQINEQMLFHGTSSEFVEAICIHNFDWRINGIHGAVFGKGTYFARDAAYSSRFCKDDIKHGNTFQIHGVSLQQRHLFRTYKSMFLARVLIGDYINGDSKYMRPPSKDGSYVNLYDSCVDDTWNPKIFVVFDANQIYPEYLIDFH

SEQ ID NO: 4885 - protein, 875 aa, Homo sapiens
MEKLHQCYWKSGEPQSDDIEASRMKRAAAKHLIERYYHQLTEGCGNEACTNEFCASCPTFLRMDNNAAAIKALELYKINAKLCDPHPSKKGASSAYLENSKGAPNNSCSEIKMNKKGARIDFKDVTYLTEEKVYEILELCREREDYSPLIRVIGRVFSSAEALVQSFRKVKQHTKEELKSLQAKDEDKDEDEKEKAACSAAAMEEDSEASSSRIGDSSQGDNNLQKLGPDDVSVDIDAIRRVYTRLLSNEKIETAFLNALVYLSPNVECDLTYHNVYSRDPNYLNLFIIVMENRNLHSPEYLEMALPLFCKAMSKLPLAAQGKLIRLWSKYNADQIRRMMETFQQLITYKVISNEFNSRNLVNDDDAIVAASKCLKMVYYANVVGGEVDTNHNEEDDEEPIPESSELTLQELLGEERRNKKGPRVDPLETELGVKTLDCRKPLIPFEEFINEPLNEVLEMDKDYTFFKVETENKFSFMTCPFILNAVTKNLGLYYDNRIRMYSERRITVLYSLVQGQQLNPYLRLKVRRDHIIDDALVRLEMIAMENPADLKKQLYVEFEGEQGVDEGGVSKEFFQLVVEEIFNPDIGMFTYDESTKLFWFNPSSFETEGQFTLIGIVLGLAIYNNCILDVHFPMVVYRKLMGKKGTFRDLGDSHPVLYQSLKDLLEYEGNVEDDMMITFQISQTDLFGNPMMYDLKENGDKIPITNENRKEFVNLYSDYILNKSVEKQFKAFRRGFHMVTNESPLKYLFRPEEIELLICGSRNLDFQALEETTEYDGGYTRDSVLIREFWEIVHSFTDEQKRLFLQFTTGTDRAPVGGLGKLKMIIAKNGPDTERLPTSHTCFNVLLLPEYSSKEKLKERLLKAITYAKGFGML

SEQ ID NO: 4886 - protein, 852 aa, Homo sapiens
MKRAAAKHLIERYYHQLTEGCGNEACTNEFCASCPTFLRMDNNAAAIKALELYKINAKLCDPHPSKKGASSAYLENSKGAPNNSCSEIKMNKKGARIDFKDVTYLTEEKVYEILELCREREDYSPLIRVIGRVFSSAEALVQSFRKVKQHTKEELKSLQAKDEDKDEDEKEKAACSAAAMEEDSEASSSRIGDSSQGDNNLQKLGPDDVSVDIDAIRRVYTRLLSNEKIETAFLNALVYLSPNVECDLTYHNVYSRDPNYLNLFIIVMENRNLHSPEYLEMALPLFCKAMSKLPLAAQGKLIRLWSKYNADQIRRMMETFQQLITYKVISNEFNSRNLVNDDDAIVAASKCLKMVYYANVVGGEVDTNHNEEDDEEPIPESSELTLQELLGEERRNKKGPRVDPLETELGVKTLDCRKPLIPFEEFINEPLNEVLEMDKDYTFFKVETENKFSFMTCPFILNAVTKNLGLYYDNRIRMYSERRITVLYSLVQGQQLNPYLRLKVRRDHIIDDALVRLEMIAMENPADLKKQLYVEFEGEQGVDEGGVSKEFFQLVVEEIFNPDIGMFTYDESTKLFWFNPSSFETEGQFTLIGIVLGLAIYNNCILDVHFPMVVYRKLMGKKGTFRDLGDSHPVLYQSLKDLLEYEGNVEDDMMITFQISQTDLFGNPMMYDLKENGDKIPITNENRKEFVNLYSDYILNKSVEKQFKAFRRGFHMVTNESPLKYLFRPEEIELLICGSRNLDFQALEETTEYDGGYTRDSVLIREFWEIVHSFTDEQKRLFLQFTTGTDRAPVGGLGKLKMIIAKNGPDTERLPTSHTCFNVLLLPEYSSKEKLKERLLKAITYAKGFGML

SEQ ID NO: 4887 - protein, 872 aa, Homo sapiens
MATACKRSGEPQSDDIEASRMKRAAAKHLIERYYHQLTEGCGNEACTNEFCASCPTFLRMDNNAAAIKALELYKINAKLCDPHPSKKGASSAYLENSKGAPNNSCSEIKMNKKGARIDFKDVTYLTEEKVYEILELCREREDYSPLIRVIGRVFSSAEALVQSFRKVKQHTKEELKSLQAKDEDKDEDEKEKAACSAAAMEEDSEASSSRIGDSSQGDNNLQKLGPDDVSVDIDAIRRVYTRLLSNEKIETAFLNALVYLSPNVECDLTYHNVYSRDPNYLNLFIIVMENRNLHSPEYLEMALPLFCKAMSKLPLAAQGKLIRLWSKYNADQIRRMMETFQQLITYKVISNEFNSRNLVNDDDAIVAASKCLKMVYYANVVGGEVDTNHNEEDDEEPIPESSELTLQELLGEERRNKKGPRVDPLETELGVKTLDCRKPLIPFEEFINEPLNEVLEMDKDYTFFKVETENKFSFMTCPFILNAVTKNLGLYYDNRIRMYSERRITVLYSLVQGQQLNPYLRLKVRRDHIIDDALVRLEMIAMENPADLKKQLYVEFEGEQGVDEGGVSKEFFQLVVEEIFNPDIGMFTYDESTKLFWFNPSSFETEGQFTLIGIVLGLAIYNNCILDVHFPMVVYRKLMGKKGTFRDLGDSHPVLYQSLKDLLEYEGNVEDDMMITFQISQTDLFGNPMMYDLKENGDKIPITNENRKEFVNLYSDYILNKSVEKQFKAFRRGFHMVTNESPLKYLFRPEEIELLICGSRNLDFQALEETTEYDGGYTRDSVLIREFWEIVHSFTDEQKRLFLQFTTGTDRAPVGGLGKLKMIIAKNGPDTERLPTSHTCFNVLLLPEYSSKEKLKERLLKAITYAKGFGML

SEQ ID NO: 4888 - protein, 336 aa, Homo sapiens
MDYPTLLLALLHVYRALCEEVLWHTSVPFAENMSLECVYPSMGILTQVEWFKIGTQQDSIAIFSPTHGMVIRKPYAERVYFLNSTMASNNMTLFFRNASEDDVGYYSCSLYTYPQGTWQKVIQVVQSDSFEAAVPSNSHIVSEPGKNVTLTCQPQMTWPVQAVRWEKIQPRQIDLLTYCNLVHGRNFTSKFPRQIVSNCSHGRWSVIVIPDVTVSDSGLYRCYLQASAGENETFVMRLTVAEGKTDNQYTLFVAGGTVLLLLFVISITTIIVIFLNRRRRRERRDLFTESWDTQKAPNNYRSPISTGQPTNQSMDDTREDIYVNYPTFSRRPKTRV

SEQ ID NO: 4889 - protein, 169 aa, Homo sapiens
MKGSRIELGDVTPHNIKQLKRLNQVIFPVSYNDKFYKDVLEVGELAKLAYFNDIAVGAVCCRVDHSQNQKRLYIMTLGCLAPYRRLGIGTKMLNHVLNICEKDGTFDNIYLHVQISNESAIDFYRKFGFEIIETKKNYYKRIEPADAHVLQKNLKVPSGQNADVQKTDN

SEQ ID NO: 4890 - protein, 255 aa, Homo sapiens
MSMEDPFFVVKGEVQKAVNTAQGLFQRWTELLQDPSTATREEIDWTTNELRNNLRSIEWDLEDLDETISIVEANPRKFNLDATELSIRKAFITSTRQVVRDMKDQMSTSSVQALAERKNRQALLGDSGSQNWSTGTTDKYGRLDRELQRANSHFIEEQQAQQQLIVEQQDEQLELVSGSIGVLKNMSQRIGGELEEQAVMLEDFSHELESTQSRLDNVMKKLAKVSHMTSDRRQWCAIAILFAVLLVVLILFLVL

SEQ ID NO: 4891 - protein, 296 aa, Homo sapiens
MATSSAALPRILGAGARAPSRWLGFLGKATPRPARPSRRTLGSATALMIRESEDSTDFNDKILNEPLKHSDFFNVKELFSVRSLFDARVHLGHKAGCRHRFMEPYIFGSRLDHDIIDLEQTATHLQLALNFTAHMAYRKGIILFISRNRQFSYLIENMARDCGEYAHTRYFRGGMLTNARLLFGPTVRLPDLIIFLHTLNNIFEPHVAVRDAAKMNIPTVGIVDTNCNPCLITYPVPGNDDSPLAVHLYCRLFQTAITRAKEKRQQVEALYRLQGQKEPGDQGPAHPPGADMSHSL

SEQ ID NO: 4892 - protein, 123 aa, Homo sapiens
MACRCLSFLLMGTFLSVSQTVLAQLDALLVFPGQVAQLSCTLSPQHVTIRDYGVSWYQQRAGSAPRYLLYYRSEEDHHRPADIPDRFSAAKDEAHNACVLTISPVQPEDDADYYCSVGYGFSP

SEQ ID NO: 4893 - protein, 571 aa, Homo sapiens
MTILPKKKPPPPDADPANEPPPPGPMPPAPRRGGGVGVGGGGTGVGGGDRDRDSGVVGARPRASPPPQGPLPGPPGALHRWALAVPPGAVAGPRPQQASPPPCGGPGGPGGGPGDALGAAAAGVGAAGVVVGVGGAVGVGGCCSGPGHSKRRRQAPGVGAVGGGSPEREEVGAGYNSEDEYEAAAARIEAMDPATVEQQEHWFEKALRDKKGFIIKQMKEDGACLFRAVADQVYGDQDMHEVVRKHCMDYLMKNADYFSNYVTEDFTTYINRKRKNNCHGNHIEMQAMAEMYNRPVEVYQYSTGTSAVEPINTFHGIHQNEDEPIRVSYHRNIHYNSVVNPNKATIGVGLGLPSFKPGFAEQSLMKNAIKTSEESWIEQQMLEDKKRATDWEATNEAIEEQVARESYLQWLRDQEKQARQVRGPSQPRKASATCSSATAAASSGLEEWTSRSPRQRSSASSPEHPELHAELGMKPPSPGTVLALAKPPSPCAPGTSSQFSAGADRATSPLVSLYPALECRALIQQMSPSAFGLNDWDDDEILASVLAVSQQEYLDSMKKNKVHRDPPPDKS

SEQ ID NO: 4894 - protein, 188 aa, Homo sapiens
MSQAPGAQPSPPTVYHERQRLELCAVHALNNVLQQQLFSQEAADEICKRLAPDSRLNPHRSLLGTGNYDVNVIMAALQGLGLAAVWWDRRRPLSQLALPQVLGLILNLPSPVSLGLLSLPLRRRHWVALRQVDGVYYNLDSKLRAPEALGDEDGVRAFLAAALAQGLCEVLLVVTKEVEEKGSWLRTD

SEQ ID NO: 4895 - protein, 147 aa, Homo sapiens
MGFIFSKSMNESMKNQKEFMLMNARLQLERQLIMQSEMRERQMAMRIAWSREFLKYFGTFFGLAAISLTAGAIKKKKPAFLVPIVPLSFILTYQYDLGYGTLLERMKGEAEDILETEKSKLQLPRGMITFESIEKARKEQSRFFIDK

SEQ ID NO: 4896 - protein, 277 aa, Homo sapiens
MCVGARRLGRGPCAALLLLGLGLSTVTGLHCVGDTYPSNDRCCHECRPGNGMVSRCSRSQNTVCRPCGPGFYNDVVSSKPCKPCTWCNLRSGSERKQLCTATQDTVCRCRAGTQPLDSYKPGVDCAPCPPGHFSPGDNQACKPWTNCTLAGKHTLQPASNSSDAICEDRDPPATQPQETQGPPARPITVQPTEAWPRTSQGPSTRPVEVPGGRAVAAILGLGLVLGLLGPLAILLALYLLRRDQRLPPDAHKPPGGGSFRTPIQEEQADAHSTLAKI

SEQ ID NO: 4897 - protein, 101 aa, Homo sapiens
MSDQEAKPSTEDLGDKKEGEYIKLKVIGQDSSEIHFKVKMTTHLKKLKESYCQRQGVPMNSLRFLFEGQRIADNHTPKELGMEEEDVIEVYQEQTGGHSTV

SEQ ID NO: 4898 - protein, 76 aa, Homo sapiens
MSDQDSSEIHFKVKMTTHLKKLKESYCQRQGVPMNSLRFLFEGQRIADNHTPKELGMEEEDVIEVYQEQTGGHSTV

SEQ ID NO: 4899 - protein, 101 aa, Homo sapiens; identical to SEQ ID NO: 4897

SEQ ID NO: 4900 - protein, 144 aa, Homo sapiens
MACAAARSPADQDRFICIYPAYLNNKKTIAEGRRIPISKAVENPTATEIQDVCSAVGLNVFLEKNKMYSREWNRDVQYRGRVRVQLKQEDGSLCLVQFPSRKSVMLYAAEMIPKLKTRTQKTGGADQSLQQGEGSKKGKGKKKK

SEQ ID NO: 4901 - protein, 861 aa, Homo sapiens
MEALGPGPPASLFQPPRRPGLGTVGKPIRLLANHFQVQIPKIDVYHYDVDIKPEKRPRRVNREVVDTMVRHFKMQIFGDRQPGYDGKRNMYTAHPLPIGRDRVDMEVTLPGEGKDQTFKVSVQWVSVVSLQLLLEALAGHLNEVPDDSVQALDVITRHLPSMRYTPVGRSFFSPPEGYYHPLGGGREVWFGFHQSVRPAMWNMMLNIDVSATAFYRAQPIIEFMCEVLDIQNINEQTKPLTDSQRVKFTKEIRGLKVEVTHCGQMKRKYRVCNVTRRPASHQTFPLQLENGQAMECTVAQYFKQKYSLQLKYPHLPCLQVGQEQKHTYLPLEVCNIVAGQRCIKKLTDNQTSTMIKATARSAPDRQEEISRLVKSNSMVGGPDPYLKEFGIVVHNEMTELTGRVLPAPMLQYGGRNKTVATPNQGVWDMRGKQFYAGIEIKVWAVACFAPQKQCREDLLKSFTDQLRKISKDAGMPIQGQPCFCKYAQGADSVEPMFKHLKMTYVGLQLIVVILPGKTPVYAEVKRVGDTLLGMATQCVQVKNVVKTSPQTLSNLCLKINAKLGGINNVLVPHQRPSVFQQPVIFLGADVTHPPAGDGKKPSIAAVVGSMDGHPSRYCATVRVQTSRQEISQELLYSQEVIQDLTNMVRELLIQFYKSTRFKPTRIIYYRGGVSEGQMKQVAWPELIAIRKACISLEEDYRPGITYIVVQKRHHTRLFCADKTERVGKSGNVPAGTTVDSTITHPSEFDFYLCSHAGIQGTSRPSHYQVLWDDNCFTADELQLLTYQLCHTYVRCTRSVSIPAPAYYARLVAFRARYHLVDKDHDSAEGSHVSGQSNGRDPQALAKAVQIHHDTQHTMYFA

SEQ ID NO: 4902 - protein, 365 aa, Homo sapiens
MMGRRRAFAVDGRDGAGEGLARGCIVPGVTSTYRRIPDAAHGCSSWERGDKFRGVGREALFLKLASRDSGVEMAVGDSPLAALPGLSQDSLDFESSGSSEPPAQVGRLLASQKLGEVLERSRRLPTAPTSLSGQHRSLRLASKPEREVPLGAGQQESMEADTDLEAGLEEEAVGGLGPGAWACLPGQGLRYLEHLCLVLEQMARLQQLYLQLRIQRPPGDPGEEESTRAPLPSPLHTPGNRGQGPWELLSQTEHTGAKAASPPKVEVPSANPPRLPETPVEPTYHLPSSQGHKRDISHWDKVKVLLNRICRRSHHHPEPPAPPDGSDPRIESRDLPERPQCRPHRKTFMPSLVVKKQRAKNLSVG

SEQ ID NO: 4903 - protein, 711 aa, Homo sapiens
MHLKPYWKLQKKEHPPEVSRETQRTPMNHQKAVNDETCKASHITSSVFPSASLGKASSRKPFGILSPNVLCSMSGKSPVESSLNVKTKKNAPSATIHQGEEEGPLDIWAVVKPGNTKEKIAFFASHQCSNRIGSMKIKSSWDIDGRATKRRKKSGDLKKAKVQVERMREVNSRCYQPEPFACGIEHCSVHYVSDSGDGVYAGRPLSVIQMVAFLEQRASALLASCSKNCTNSPAIVRFSGQSRGVPAVSESYSAPGACEEPTERGNLEVGEPQSEPVRVLDMVAKLESECLKRQGQREPGSLSRNNSFRRNVGRVLLANSTQADEGKTKKGVLEAPDTQVNPVGSVSVDCGPSRADRCSPKEDQAWDGASQDCPPLPAGVSFHIDSAELEPGSQTAVKNSNRYDVEMTDELVGLPFSSHTYSQASELPTDAVDCMSRELVSLTSRNPDQRKESLCISITVSKVDKDQPSILNSCEDPVPGMLFFLPPGQHLSDYSQLNESTTKESSEASQLEDAAGGDSASEEKSGSAEPFVLPASSVESTLPVLEASSWKKQVSHDFLETRFKIQQLLEPQQYMAFLPHHIMVKIFRLLPTKSLVALKCTCCYFKFIIEYYNIRPADSRWVRDPRYREDPCKQCKKKYVKGDVSLCRWHPKPYCQALPYGPGYWMCCHRSQKGFPGCKLGLHDNHWVPACHSFNRAIHKKAKGTEAEEEY

SEQ ID NO: 4904 - protein, 448 aa, Homo sapiens
MDPKYFILILFCGHLNNTFFSKTETITTEKQSQPTLFTSSMSQVLANSQNTTGNPLGQPTQFSDTFSGQSISPAKVTAGQPTPAVYTSSEKPEAHTSAGQPLAYNTKQPTPIANTSSQQAVFTSARQLPSARTSTTQPPKSFVYTFTQQSSSVQIPSRKQITVHNPSTQPTSTVKNSPRSTPGFILDTTSNKQTPQKNNYNSIAAILIGVLLTSMLVAIIIIVLWKCLRKPVLNDQNWAGRSPFADGETPDICMDNIRENEISTKRTSIISLTPWKPSKSTLLADDLEIKLFESSENIEDSNNPKTEKIKDQVNGTSEDSADGSTVGTAVSSSDDAGLPPPPPLLDLEGQESNQSDKPTMTIVSPLPNDSTSLPPSLDCLNQDCGDHKSEIIQSFPPLDSLNLPLPPVDFMKNQEDSNLEIQCQEFSIPPNSDQDLNESLPPPPAELL

SEQ ID NO: 4905 - protein, 757 aa, Homo sapiens
MKVFCEVLEELYKKVLLGATLENDSHDYIFYLNPAVSDQDCSTATSLEWANTCGIQGRHQPISVGVAPIAVAPVCLKTNSQMSGSREVMLLQLTVIKVMTTRILSVKTEFHAKEQYRDVIKILLESAKVDSKLICMFQNSDKLLSHMAAQCLALLLYFQLREKITLSNSWIAFCQKNLSEYSESNKAIYCLWTLTAIIKEIFKDSCSQKTEILKQFLTHFDTIFEVFYNSLFSQHFENCRDTSKIVNILMCFLDLLELLIASRIHLKLHFTCQRILFLKPSCMLEVITWPIQAFVKRKVIIFLKKCLLCKVGEDLCRGSVPALMPPDHHVAVDMLALANAVLQAVNSGLLKTLSVYEKHSFFGGDEVQPECELITSPDHVILRAASLVIMKSLEIKFQNYSSASEVKVDLQRFMSELLTFLKPHLQPSLQLHNPCKWLSRVFIEQDDDMLEAAKASLGIYLTLTRGCEATESLTQGKEMWDHHTHENGYNPHCIFLFFLKNIGFDSTVLLDFLISSETCFLEYFVRYLKLLQKDWDNFFTICNNFDATESKYDISICGCVPSLVQDQSSNQTIPHRLTAPHSHRDVCARHSWASDAPSEPLKAVMSKGAHTMCASSLSSPRASQSLVDYDSSDDSDVESTEQCLANSKQTSLHQQATKEIQDAAGTSRDKKEFSLEPPSRPLVLKEFDTAFSFDCEVAPNDVVSEVGIFYRIVKCFQELQDAICRLQKKNLFPYNPTALLKLLKYIEVISNKTMNTL

SEQ ID NO: 4906 - protein, 436 aa, Homo sapiens
MKVFCEVLEELYKKVLLGATLENDSHDYIFYLNPAVSDQDCSTATSLEWANTCGIQGRHQPISVGVAPIAVAPVCLKTNSQMSGSREVMLLQLTVIKVMTTRILSVKTEFHAKEQYRDVIKILLESAKVDSKLICMFQNSDKLLSHMAAQCLALLLYFQLREKITLSNSWIAFCQKNLSEYSESNKAIYCLWTLTAIIKEIFKDSCSQKTEILKQFLTHFDTIFEVFYNSLFSQHFENCRDTSKIVNILMCFLDLLELLIASRIHLKLHFTCQRILFLKPSCMLEVITWPIQAFVKRKVIIFLKKCLLCKVGEDLCRGSVPALMPPDHHVAVDMLALANAVLQAVNSGLLKTLSVYEKHSFFGGDEVQPECELITSPDHVILRAASLVIMKSLEIKFQNYSSASEVKGNSPNSFCMQCVIIYLSTVIHNYQISGLV

SEQ ID NO: 4907 - protein, 409 aa, Homo sapiens
MKVFCEVLEELYKKVLLGATLENDSHDYIFYLNPAVSDQDCSTATSLEWANTCGIQGRHQPISVGVAPIAVAPVCLKTNSQMSGSREVMLLQLTVIKVMTTRILSVKTEFHAKEQYRDVIKILLESAKVDSKLICMFQNSDKLLSHMAAQCLALLLYFQLREKITLSNSWIAFCQKNLSEYSESNKAIYCLWTLTAIIKEIFKDSCSQKTEILKQFLTHFDTIFEVFYNSLFSQHFENCRDTSKIVNILMCFLDLLELLIASRIHLKLHFTCQRILFLKPSCMLEVITWPIQAFVKRKVIIFLKKCLLCKVGEDLCRGSVPALMPPDHHVAVDMLALANAVLQAVNSGLLKTLSVYEKHSFFGGDEVQPECELITSPDHVILRAASLVIMKSLEIKFQNYSSASEVKGA

SEQ ID NO: 4908 - protein, 128 aa, Homo sapiens
MAGNLLSGAGRRLWDWVPLACRSFSLGVPRLIGIRLTLPPPKVVDRWNEKRAMFGVYDNIGILGNFEKHPKELIRGPIWLRGWKGNELQRCIRKRKMVGSRMFADDLHNLNKRIRYLYKHFNRHGKFR

SEQ ID NO: 4909 - protein, 2802 aa, Homo sapiens
MQSGEQRPGRIQTLGKSGIPHPDPRPGGSGWPFQWHWWRAAGPEPGRAMAASERLYELWLLYYAQKDLGYLQQWLKAFVGAFKKSISLSSLEPRRPEEAGAEVPLLPLDELHVLAEQLHQADLEQALLLLKLFIILCRNLENIEAGRGQVLVPRVLALLTKLVAELKGCPPPQGRGTQLENVALHALLLCEGLFDPYQTWRRQRSGEVISSKEKSKYKFPPAALPQEFSAFFQESLQNADHLPPILLLRLIHLFCAVLAGGKENGQMAVSDGSVKGLLSVVRGWSRGPAPDPCLVPLALEALVGAVHVLHASRAPPRGPELRALLESYFHVLNADWPAGLSSGPEEALVTLRVSMLDAIPMMLACEDRPVLQATFLSNNCFEHLTRLIQNSKLYLQSRAPPEGDSDLATRLLTEPDVQKVLDQDTDAIAVHVVRVLTCIMSDSPSAKEVFKERIGYPHLQEVLQSHGPPTHRLLQELLNMAVEGDHSMCPPPPIRNEQPVLVLAQWLPSLPTAELRLFLAQRLRWLCDSCPASRATCVQAGLVGCLLETLSTGLALEARCQEQLLALLQALGRVSIRPMELRHLLRPRPGLDSEPGGAEAGKARHAGAVIRTLSGMARHQGPARALRYFDLTPSMAGIMVPPVQRWPGPGFTFHAWLCLHPMDTAPTPAPTRPLQRKQLYSFFTSSGSGFEAFFTAAGTLVVAVCTRKEYLTMSLPEVSFADSAWHCVAIVHVPGRRPFSQNLVHVYKDGHLVKTAPLRCPSLSEPFSSCCIGSAGYRTTTTTTGLPTPPVPATLAYTHPALTRSQSVPASTGLGWGSGLVAPLQEGSIDSTLAGTQDTRWGSPTSLEGELGAVAIFHEALQATALRTLCTLGPNETAPFKPEGELHELSTRLLLHYSPQACKNNICLDLSPSHGLDGRLTGHRVETWDVKDVVNCVGGMGALLPLLERVAAQPKEAEAGPAETHDLVGPELTSGHNTQGLVLPLGKSSEERMERNAVAAFLLMLRNFLQGHMVNQESLVQCQGPAIIGALLRKVPSWAMDMNVLMSAQLLMEQVAAEGSGPLLYLLYQHLLFNFHLWTLSDFAVRLGHIQYMSSIVREHRQKLRKKYGVQFILDALRTHYSPQRERPLAADDLRTVQTSLLGLAREFLVRSLSADDVQVTQTMLSFLAATGDDGQAVGALDLLLALLHGSLVQESLAVFLLEPGNLEVLLALLVRPGSLPLLPDRVCKILRRLQQNERLPERSRQRLRLRECGLQGLVACLPEGTVSPQLCQGLYKLFLGADCLNLSDLLAVVQLSLQADLSVRLDICRQLFHLIYGQPDVVRLLARQAGWQDVLTRLYVLEAATAGSPPPSSPESPTSPKPAPPKPPTESPAEPSDVFLPSEAPCPDPDGFYHALSPFCTPFDLGLERSSVGSGNTAGGGGSSGTLTPASQPGTPSPLDGPRPFPAAPGRHSSSLSNVLEDGSLPEPTISGDDTSNTSNPQQTSEEELCNLLTNVLFSVTWRGVEGSDEAAWRERGQVFSVLTQLGASATLVRPPDCIKRSLLEMMLESALTDIKEAPVGVLASLTQQALWLLRLLQDFLCAEGHGNQELWSEKLFEGVCSLLDRLGAWPHLANGTADLREMAQIGLRLVLGYILLEDPQLHAQAYVRLHMLLQTAVPARREEACYVLSKLEAALGRVLNTSSLESATDEAGSPLAAAAAAAAAERCSWLVPLVRTLLDRAYEPLGLQWGLPSLPPTNGSPTFFEDFQAFCATPEWRHFIDKQVQPTMSQFEMDTYAKSHDLMSGFWNACYDMLMSSGQRRQWERAQSRRAFQELVLEPAQRRARLEGLRYTAVLKQQATQHSMALLHWGALWRQLASPCGAWALRDTPIPRWKLSSAETYSRMRLKLVPNHHFDPHLEASALRDNLGEVPLTPTEEASLPLAVTKEAKVSTPPELLQEDQLGEDELAELETPMEAAELDEQREKLVLSAECQLVTVVAVVPGLLEVTTQNVYFYDGSTERVETEEGIGYDFRRPLAQLREVHLRRFNLRRSALELFFIDQANYFLNFPCKVGTTPVSSPSQTPRPQPGPIPPHTQVRNQVYSWLLRLRPPSQGYLSSRSPQEMLRASGLTQKWVQREISNFEYLMQLNTIAGRTYNDLSQYPVFPWVLQDYVSPTLDLSNPAVFRDLSKPIGVVNPKHAQLVREKYESFEDPAGTIDKFHYGTHYSNAAGVMHYLIRVEPFTSLHVQLQSGRFDCSDRQFHSVAAAWQARLESPADVKELIPEFFYFPDFLENQNGFDLGCLQLTNEKVGDVVLPPWASSPEDFIQQHRQALESEYVSAHLHEWIDLIFGYKQRGPAAEEALNVFYYCTYEGAVDLDHVTDERERKALEGIISNFGQTPCQLLKEPHPTRLSAEEAAHRLARLDTNSPSIFQHLDELKAFFAEVVSDGVPLVLALVPHRQPHSFITQGSPDLLVTVSASGLLGTHSWLPYDRNISNYFSFSKDPTMGSHKTQRLLSGPWVPGSGVSGQALAVAPDGKLLFSGGHWDGSLRVTALPRGKLLSQLSCHLDVVTCLALDTCGIYLISGSRDTTCMVWRLLHQGGLSVGLAPKPVQVLYGHGAAVSCVAISTELDMAVSGSEDGTVIIHTVRRGQFVAALRPLGATFPGPIFHLALGSEGQIVVQSSAWERPGAQVTYSLHLYSVNGKLRASLPLAEQPTALTVTEDFVLLGTAQCALHILQLNTLLPAAPPLPMKVAIRSVAVTKERSHVLVGLEDGKLIVVVAGQPSEVRSSQFARKLWRSSRRISQVSSGETEYNPTEAR

SEQ ID NO: 4910 - protein, 2821 aa, Homo sapiens
MQSGEQRPGRIQTLGKSGIPHPDPRPGGSGWPFQWHWRGGAAVTAAKCRKLGGGRQWRAAGPEPGRAMAASERLYELWLLYYAQKDLGYLQQWLKAFVGAFKKSISLSSLEPRRPEEAGAEVPLLPLDELHVLAEQLHQADLEQALLLLKLFIILCRNLENIEAGRGQVLVPRVLALLTKLVAELKGCPPPQGRGTQLENVALHALLLCEGLFDPYQTWRRQRSGEVISSKEKSKYKFPPAALPQEFSAFFQESLQNADHLPPILLLRLIHLFCAVLAGGKENGQMAVSDGSVKGLLSVVRGWSRGPAPDPCLVPLALEALVGAVHVLHASRAPPRGPELRALLESYFHVLNADWPAGLSSGPEEALVTLRVSMLDAIPMMLACEDRPVLQATFLSNNCFEHLTRLIQNSKLYLQSRAPPEGDSDLATRLLTEPDVQKVLDQDTDAIAVHVVRVLTCIMSDSPSAKEVFKERIGYPHLQEVLQSHGPPTHRLLQELLNMAVEGDHSMCPPPPIRNEQPVLVLAQWLPSLPTAELRLFLAQRLRWLCDSCPASRATCVQAGLVGCLLETLSTGLALEARCQEQLLALLQALGRVSIRPMELRHLLRPRPGLDSEPGGAEAGKARHAGAVIRTLSGMARHQGPARALRYFDLTPSMAGIMVPPVQRWPGPGFTFHAWLCLHPMDTAPTPAPTRPLQRKQLYSFFTSSGSGFEAFFTAAGTLVVAVCTRKEYLTMSLPEVSFADSAWHCVAIVHVPGRRPFSQNLVHVYKDGHLVKTAPLRCPSLSEPFSSCCIGSAGYRTTTTTTGLPTPPVPATLAYTHPALTRSQSVPASTGLGWGSGLVAPLQEGSIDSTLAGTQDTRWGSPTSLEGELGAVAIFHEALQATALRTLCTLGPNETAPFKPEGELHELSTRLLLHYSPQACKNNICLDLSPSHGLDGRLTGHRVETWDVKDVVNCVGGMGALLPLLERVAAQPKEAEAGPAETHDLVGPELTSGHNTQGLVLPLGKSSEERMERNAVAAFLLMLRNFLQGHMVNQESLVQCQGPAIIGALLRKVPSWAMDMNVLMSAQLLMEQVAAEGSGPLLYLLYQHLLFNFHLWTLSDFAVRLGHIQYMSSIVREHRQKLRKKYGVQFILDALRTHYSPQRERPLAADDLRTVQTSLLGLAREFLVRSLSADDVQVTQTMLSFLAATGDDGQAVGALDLLLALLHGSLVQESLAVFLLEPGNLEVLLALLVRPGSLPLLPDRVCKILRRLQQNERLPERSRQRLRLRECGLQGLVACLPEGTVSPQLCQGLYKLFLGADCLNLSDLLAVVQLSLQADLSVRLDICRQLFHLIYGQPDVVRLLARQAGWQDVLTRLYVLEAATAGSPPPSSPESPTSPKPAPPKPPTESPAEPSDVFLPSEAPCPDPDGFYHALSPFCTPFDLGLERSSVGSGNTAGGGGSSGTLTPASQPGTPSPLDGPRPFPAAPGRHSSSLSNVLEDGSLPEPTISGDDTSNTSNPQQTSEEELCNLLTNVLFSVTWRGVEGSDEAAWRERGQVFSVLTQLGASATLVRPPDCIKRSLLEMMLESALTDIKEAPVGVLASLTQQALWLLRLLQDFLCAEGHGNQELWSEKLFEGVCSLLDRLGAWPHLANGTADLREMAQIGLRLVLGYILLEDPQLHAQAYVRLHMLLQTAVPARREEACYVLSKLEAALGRVLNTSSLESATDEAGSPLAAAAAAAAAERCSWLVPLVRTLLDRAYEPLGLQWGLPSLPPTNGSPTFFEDFQAFCATPEWRHFIDKQVQPTMSQFEMDTYAKSHDLMSGFWNACYDMLMSSGQRRQWERAQSRRAFQELVLEPAQRRARLEGLRYTAVLKQQATQHSMALLHWGALWRQLASPCGAWALRDTPIPRWKLSSAETYSRMRLKLVPNHHFDPHLEASALRDNLGEVPLTPTEEASLPLAVTKEAKVSTPPELLQEDQLGEDELAELETPMEAAELDEQREKLVLSAECQLVTVVAVVPGLLEVTTQNVYFYDGSTERVETEEGIGYDFRRPLAQLREVHLRRFNLRRSALELFFIDQANYFLNFPCKVGTTPVSSPSQTPRPQPGPIPPHTQVRNQVYSWLLRLRPPSQGYLSSRSPQEMLRASGLTQKWVQREISNFEYLMQLNTIAGRTYNDLSQYPVFPWVLQDYVSPTLDLSNPAVFRDLSKPIGVVNPKHAQLVREKYESFEDPAGTIDKFHYGTHYSNAAGVMHYLIRVEPFTSLHVQLQSGRFDCSDRQFHSVAAAWQARLESPADVKELIPEFFYFPDFLENQNGFDLGCLQLTNEKVGDVVLPPWASSPEDFIQQHRQALESEYVSAHLHEWIDLIFGYKQRGPAAEEALNVFYYCTYEGAVDLDHVTDERERKALEGIISNFGQTPCQLLKEPHPTRLSAEEAAHRLARLDTNSPSIFQHLDELKAFFAEVVSDGVPLVLALVPHRQPHSFITQGSPDLLVTVSASGLLGTHSWLPYDRNISNYFSFSKDPTMGSHKTQRLLSGPWVPGSGVSGQALAVAPDGKLLFSGGHWDGSLRVTALPRGKLLSQLSCHLDVVTCLALDTCGIYLISGSRDTTCMVWRLLHQGGLSVGLAPKPVQVLYGHGAAVSCVAISTELDMAVSGSEDGTVIIHTVRRGQFVAALRPLGATFPGPIFHLALGSEGQIVVQSSAWERPGAQVTYSLHLYSVNGKLRASLPLAEQPTALTVTEDFVLLGTAQCALHILQLNTLLPAAPPLPMKVAIRSVAVTKERSHVLVGLEDGKLIVVVAGQPSEVRSSQFARKLWRSSRRISQVSSGETEYNPTEAR

SEQ ID NO: 4911 - protein, 975 aa, Homo sapiens
MSGIGNKRAAGEPGTSMPPEKKAAVEDSGTTVETIKLGGVSSTEELDIRTLQTKNRKLAEMLDQRQAIEDELREHIEKLERRQATDDASLLIVNRYWSQFDENIRIILKRYDLEQGLGDLLTERKALVVPEPEPDSDSNQERKDDRERGEGQEPAFSFLATLASSSSEEMESQLQERVESSRRAVSQIVTVYDKLQEKVELLSRKLNSGDNLIVEEAVQELNSFLAQENMRLQELTDLLQEKHRTMSQEFSKLQSKVETAESRVSVLESMIDDLQWDIDKIRKREQRLNRHLAEVLERVNSKGYKVYGAGSSLYGGTITINARKFEEMNAELEENKELAQNRLCELEKLRQDFEEVTTQNEKLKVELRSAVEQVVKETPEYRCMQSQFSVLYNESLQLKAHLDEARTLLHGTRGTHQHQVELIERDEVSLHKKLRTEVIQLEDTLAQVRKEYEMLRIEFEQTLAANEQAGPINREMRHLISSLQNHNHQLKGEVLRYKRKLREAQSDLNKTRLRSGSALLQSQSSTEDPKDEPAELKPDSEDLSSQSSASKASQEDANEIKSKRDEEERERERREKEREREREREKEKEREREKQKLKESEKERDSAKDKEKGKHDDGRKKEAEIIKQLKIELKKAQESQKEMKLLLDMYRSAPKEQRDKVQLMAAEKKSKAELEDLRQRLKDLEDKEKKENKKMADEDALRKIRAVEEQIEYLQKKLAMAKQEEEALLSEMDVTGQAFEDMQEQNIRLMQQLREKDDANFKLMSERIKSNQIHKLLKEEKEELADQVLTLKTQVDAQLQVVRKLEEKEHLLQSNIGTGEKELGLRTQALEMNKRKAMEAAQLADDLKAQLELAQKKLHDFQDEIVENSVTKEKDMFNFKRAQEDISRLRRKLETTKKPDNVPKCDEILMEEIKDYKARLTCPCCNMRKKDAVLTKCFHVFCFECVKTRYDTRQRKCPKCNAAFGANDFHRIYIG

SEQ ID NO: 4912 - protein, 93 aa, Homo sapiens
MSTDTGVSLPSYEEDQGSKLIRKAKEAPFVPVGIAGFAAIVAYGLYKLKSRGNTKMSIHLIHMRVAAQGFVVGAMTVGMGYSMYREFWAKPEP

SEQ ID NO: 4913 - protein, 184 aa, Homo sapiens
MAEPQPPSGGLTDEAALSCCSDADPSTKDFLLQQTMLRVKDPKKSLDFYTRVLGMTLIQKCDFPIMKFSLYFLAYEDKNDIPKEKDEKIAWALSRKATLELTHNWGTEDDATQSYHNGNSDPRGFGHIGIAVPDVYSACKRFEELGVKFVKKPDDGKMKGLAFIQDPDGYWIEILNPNKMATLM

SEQ ID NO: 4914 - protein, 621 aa, Homo sapiens
MEHIRTTKVEQVKLLDRFSTSNKSLTGTLYLTATHLLFIDSHQKETWILHHHIASVEKLALTTSGCPLVIQCKNFRTVHFIVPRERDCHDIYNSLLQLSKQAKYEDLYAFSYNPKQNDSERLQGWQLIDLAEEYKRMGVPNSHWQLSDANRDYKICETYPRELYVPRIASKPIIVGSSKFRSKGRFPVLSYYHQDKEAAICRCSQPLSGFSARCLEDEHLLQAISKANPVNRYMYVMDTRPKLNAMANRAAGKGYENEDNYSNIRFQFVGIENIHVMRSSLQKLLEVNGTKGLSVNDFYSGLESSGWLRHIKAVMDAAVFLAKAITVENASVLVHCSDGWDRTSQVCSLGSLLLDSYYRTIKGFMVLIEKDWISFGHKFSERCGQLDGDPKEVSPVFTQFLECVWHLTEQFPQAFEFSEAFLLQIHEHIHSCQFGNFLGNCQKEREELKLKEKTYSLWPFLLEDQKKYLNPLYSSESHRFTVLEPNTVSFNFKFWRNMYHQFDRTLHPRQSVFNIIMNMNEQNKQLEKDIKDLESKIKQRKNKQTDGILTKELLHSVHPESPNLKTSLCFKEQTLLPVNDALRTIEGSSPADNRYSEYAEEFSKSEPAVVSLEYGVARMTC

SEQ ID NO: 4915 - protein, 237 aa, Homo sapiens
MTSEITYAEVRFKNEFKSSGINTASSAASKERTAPHKSNTGFPKLLCASLLIFFLLLAISFFIAFVIFFQKYSQLLEKKTTKELVHTTLECVKKNMPVEETAWSCCPKNWKSFSSNCYFISTESASWQDSEKDCARMEAHLLVINTQEEQDFIFQNLQEESAYFVGLSDPEGQRHWQWVDQTPYNESSTFWHPREPSDPNERCVVLNFRKSPKRWGWNDVNCLGPQRSVCEMMKIHL

SEQ ID NO: 4916 - protein, 197 aa, Homo sapiens
MTSEITYAEVRFKNEFKSSGINTASSAVFQKYSQLLEKKTTKELVHTTLECVKKNMPVEETAWSCCPKNWKSFSSNCYFISTESASWQDSEKDCARMEAHLLVINTQEEQDFIFQNLQEESAYFVGLSDPEGQRHWQWVDQTPYNESSTFWHPREPSDPNERCVVLNFRKSPKRWGWNDVNCLGPQRSVCEMMKIHL

SEQ ID NO: 4917 - protein, 165 aa, Homo sapiens
MTSEITYAEVRFKNEFKSSGINTASSAETAWSCCPKNWKSFSSNCYFISTESASWQDSEKDCARMEAHLLVINTQEEQDFIFQNLQEESAYFVGLSDPEGQRHWQWVDQTPYNESSTFWHPREPSDPNERCVVLNFRKSPKRWGWNDVNCLGPQRSVCEMMKIHL

SEQ ID NO: 4918 - protein, 204 aa, Homo sapiens
MTSEITYAEVRFKNEFKSSGINTASSAASKERTAPHKSNTGFPKLLCASLLIFFLLLAISFFIAFVKTAWSCCPKNWKSFSSNCYFISTESASWQDSEKDCARMEAHLLVINTQEEQDFIFQNLQEESAYFVGLSDPEGQRHWQWVDQTPYNESSTFWHPREPSDPNERCVVLNFRKSPKRWGWNDVNCLGPQRSVCEMMKIHL

SEQ ID NO: 4919 - protein, 372 aa, Homo sapiens
MAKQYDSVECPFCDEVSKYEKLAKIGQGTFGEVFKARHRKTGQKVALKKVLMENEKEGFPITALREIKILQLLKHENVVNLIEICRTKASPYNRCKGSIYLVFDFCEHDLAGLLSNVLVKFTLSEIKRVMQMLLNGLYYIHRNKILHRDMKAANVLITRDGVLKLADFGLARAFSLAKNSQPNRYTNRVVTLWYRPPELLLGERDYGPPIDLWGAGCIMAEMWTRSPIMQGNTEQHQLALISQLCGSITPEVWPNVDNYELYEKLELVKGQKRKVKDRLKAYVRDPYALDLIDKLLVLDPAQRIDSDDALNHDFFWSDPMPSDLKGMLSTHLTSMFEYLAPPRRKGSQITQQSTNQSRNPATTNQTEFERVF

SEQ ID NO: 4920 - protein, 458 aa, Homo sapiens
MNRGVPFRHLLLVLQLALLPAATQGKKVVLGKKGDTVELTCTASQKKSIQFHWKNSNQIKILGNQGSFLTKGPSKLNDRADSRRSLWDQGNFPLIIKNLKIEDSDTYICEVEDQKEEVQLLVFGLTANSDTHLLQGQSLTLTLESPPGSSPSVQCRSPRGKNIQGGKTLSVSQLELQDSGTWTCTVLQNQKKVEFKIDIVVLAFQKASSIVYKKEGEQVEFSFPLAFTVEKLTGSGELWWQAERASSSKSWITFDLKNKEVSVKRVTQDPKLQMGKKLPLHLTLPQALPQYAGSGNLTLALEAKTGKLHQEVNLVVMRATQLQKNLTCEVWGPTSPKLMLSLKLENKEAKVSKREKAVWVLNPEAGMWQCLLSDSGQVLLESNIKVLPTWSTPVQPMALIVLGGVAGLLLFIGLGIFFCVRCRHRRRQAERMSQIKRLLSEKKTCQCPHRFQKTCSPI

SEQ ID NO: 4921 - protein, 580 aa, Homo sapiens
MWRPVQLCHFHSALLHRRQKPWPSPAVFFRRNVRGLPPRFSSPTPLWRKVLSTAVVGAPLLLGARYVMAEAREKRRMRLVVDGMGRFGRSLKVGLQISLDYWWCTNVVLRGVEENSPGYLEVMSACHQRAADALVAGAISNGGLYVKLGQGLCSFNHLLPPEYTRTLRVLEDRALKRGFQEVDELFLEDFQALPHELFQEFDYQPIAAASLAQVHRAKLHDGTSVAVKVQYIDLRDRFDGDIHTLELLLRLVEVMHPSFGFSWVLQDLKGTLAQELDFENEGRNAERCARELAHFPYVVVPRVHWDKSSKRVLTADFCAGCKVNDVEAIRSQGLAVHDIAEKLIKAFAEQIFYTGFIHSDPHPGNVLVRKGPDGKAELVLLDHGLYQFLEEKDRAALCQLWRAIILRDDAAMRAHAAALGVQDYLLFAEMLMQRPVRLGQLWGSHLLSREEAAYMVDMARERFEAVMAVLRELPRPMLLVLRNINTVRAINVALGAPVDRYFLMAKRAVRGWSRLAGATYRGVYGTSLLRHAKVVWEMLKFEVALRLETLAMRLTALLARALVHLSLVPPAEELYQYLET

SEQ ID NO: 4922 - protein, 929 aa, Homo sapiens
MEGDGVPWGSEPVSGPGPGGGGMIRELCRGFGRYRRYLGRLRQNLRETQKFFRDIKCSHNHTCLSSLTGGGGAERGPAGDVAETGLQAGQLSCISFPPKEEKYLQQIVDCLPCILILGQDCNVKCQLLNLLLGVQVLPTTKLGSEESCKLRRLRFTYGTQTRVSLALPGQYELVHTLVAHQGNWETIPEEDLEVQENNEDAAHVLAELEVTMHHALLQEVDVVVAPCQGLRPTVDVLGDLVNDFLPVITYALHKDELSERDEQELQEIRKYFSFPVFFFKVPKLGSEIIDSSTRRMESERSPLYRQLIDLGYLSSSHWNCGAPGQDTKAQSMLVEQSEKLRHLSTFSHQVLQTRLVDAAKALNLVHCHCLDIFINQAFDMQRDLQITPKRLEYTRKKENELYESLMNIANRKQEEMKDMIVETLNTMKEELLDDATNMEFKDVIVPENGEPVGTREIKCCIRQIQELIISRLNQAVANKLISSVDYLRESFVGTLERCLQSLEKSQDVSVHITSNYLKQILNAAYHVEVTFHSGSSVTRMLWEQIKQIIQRITWVSPPAITLEWKRKVAQEAIESLSASKLAKSICSQFRTRLNSSHEAFAASLRQLEAGHSGRLEKTEDLWLRVRKDHAPRLARLSLESCSLQDVLLHRKPKLGQELGRGQYGVVYLCDNWGGHFPCALKSVVPPDEKHWNDLALEFHYMRSLPKHERLVDLHGSVIDYNYGGGSSIAVLLIMERLHRDLYTGLKAGLTLETRLQIALDVVEGIRFLHSQGLVHRDIKLKNVLLDKQNRAKITDLGFCKPEAMMSGSIVGTPIHMAPELFTGKYDNSVDVYAFGILFWYICSGSVKLPEAFERCASKDHLWNNVRRGARPERLPVFDEECWQLMEACWDGDPLKRPLLGIVQPMLQGIMNRLCKSNSEQPNRGLDDST

SEQ ID NO: 4923 - protein, 884 aa, Homo sapiens
MEGDGVPWGSEPVSGPGPGGGGMIRELCRGFGRYRRYLGRLRQNLRETQKFFRDIKCSHNHTCLSSLTGGGGAERGPAGDVAETGLQAGQLSCISFPPKEEKYLQQIVDCLPCILILGQDCNVKCQLLNLLLGVQVLPTTKLGSEESCKLRRLRFTYGTQTRVSLALPGQYELVHTLVAHQGNWETIPEEDLEVQENNEDAAHVLAELEVTMHHALLQEVDVVVAPCQGLRPTVDVLGDLVNDFLPVITYALHKDELSERDEQELQEIRKYFSFPVFFFKVPKLGSEIIDSSTRRMESERSPLYRQLIDLGYLSSSHWNCGAPGQDTKAQSMLVEQSEKLRHLSTFSHQVLQTRLVDAAKALNLVHCHCLDIFINQAFDMQRDLQITPKRLEYTRKKENELYESLMNIANRKQEEMKDMIVETLNTMKEELLDDATNMEFKDVIVPENGEPVGTREIKCCIRQIQELIISRLNQAVANKLISSVDYLRESFVGTLERCLQSLEKSQDVSVHITSNYLKQILNAAYHVEVTFHSGSSVTRMLWEQIKQIIQRITWVSPPAITLEWKRKVAQEAIESLSASKLAKSICSQFRTRLNSSHEAFAASLRQLEAGHSGRLEKTEDLWLRVRKDHAPRLARLSLESCSLQDVLLHRKPKLGQELGRGQYGVVYLCDNWGGHFPCALKSVVPPDEKHWNDLALEFHYMRSLPKHERLVDLHGSVIDYNYGGGSSIAVLLIMERLHRDLYTGLKAGLTLETRLQIALDVVEGIRFLHSQGLVHRDIKLKNVLLDKQNRAKITDLGFCKPEAMMSGSIVGTPIHMAPELFTGARPERLPVFDEECWQLMEACWDGDPLKRPLLGIVQPMLQGIMNRLCKSNSEQPNRGLDDST

SEQ ID NO: 4924 - protein, 328 aa, Homo sapiens
MMWRPSVLLLLLLLRHGAQGKPSPDAGPHGQGRVHQAAPLSDAPHDDAHGNFQYDHEAFLGREVAKEFDQLTPEESQARLGRIVDRMDRAGDGDGWVSLAELRAWIAHTQQRHIRDSVSAAWDTYDTDRDGRVGWEELRNATYGHYAPGEEFHDVEDAETYKKMLARDERRFRVADQDGDSMATREELTAFLHPEEFPHMRDIVIAETLEDLDRNKDGYVQVEEYIADLYSAEPGEEEPAWVQTERQQFRDFRDLNKDGHLDGSEVGHWVLPPAQDQPLVEANHLLHESDTDKDGRLSKAEILGNWNMFVGSQATNYGEDLTRHHDEL

SEQ ID NO: 4925 - protein, 224 aa, Homo sapiens
MAAPSEVAAIAPGEGDGGGGGFGSWLDGRLEALGVDRAVYGAYILGILQEEEEEEKLDALQGILSAFLEEDSLLNICKEIVERWSETQNVVTKVKKEDEVQAIATLIEKQAQIVVKPRMVSEEEKQRKAALLAQYADVTDEEDEADEKDDSGATTMNIGSDKLLFRNTNVEDVFNARKLERDSLRDESQRKKEQDKLQRERDKLAKQERKEKEKKRTQRGERKR

SEQ ID NO: 4926 - protein, 307 aa, Homo sapiens
MEADKDDTQQILKEHSPDEFIKDEQNKGLIDEITKKNIQLKKEIQKLETELQEATKEFQIKEDIPETKMKFLSVETPENDSQLSNISCSFQVSSKVPYEIQKGQALITFEKEEVAQNVVSMSKHHVQIKDVNLEVTAKPVPLNSGVRFQVYVEVSKMKINVTEIPDTLREDQMRDKLELSFSKFRNGGGEVDRVDYDRQSGSAVITFVEIGVADKILKKKEYPLYINQTCHRVTVSPYTEIHLKKYQIFSGTSKRTVLLTGMEGIQMDEEIVEDLINIHFQRAKNGGGEVDVVKCSLGQPHIAYFEE

SEQ ID NO: 4927 - protein, 473 aa, Homo sapiens
MAQHDFAPAWLNFPTPPSSTKSSLNFEKHSENFAWTENRYDVNRRRHNSSDGFDSAIGRPNGGNFGRKEKNGWRTHGRNGTENINHRGGYHGGSSRSRSSIFHAGKSQGLHENNIPDNETGRKEDKRERKQFEAEDFPSLNPEYEREPNHNKSLAAGVWEYPPNPKSRAPRMLVIKKGNTKDLQLSGFPVVGNLPSQPVKNGTGPSVYKGLVPKPAAPPTKPTQWKSQTKENKVGTSFPHESTFGVGNFNAFKSTAKNFSPSTNSVKECNRSNSSSPVDKLNQQPRLTKLTRMRTDKKSEFLKALKRDRVEEEHEDESRAGSEKDDDSFNLHNSNSTHQERDINRNFDENEIPQENGNASVISQQIIRSSTFPQTDVLSSSLEAEHRLLKEMGWQEDSENDETCAPLTEDEMREFQVISEQLQKNGLRKNGILKNGLICDFKFGPWKNSTFKPTTENDDTETSSSDTSDDDDV

SEQ ID NO: 4928 - protein, 239 aa, Homo sapiens
MPKSKRDKKVSLTKTAKKGLELKQNLIEELRKCVDTYKYLFIFSVANMRNSKLKDIRNAWKHSRMFFGKNKVMMVALGRSPSDEYKDNLHQVSKRLRGEVGLLFTNRTKEEVNEWFTKYTEMDYARAGNKAAFTVSLDPGPLEQFPHSMEPQLRQLGLPTALKRGVVTLLSDYEVCKEGDVLTPEQARVLKLFGYEMAEFKVTIKYMWDSQSGRFQQMGDDLPESASESTEESDSEDDD

SEQ ID NO: 4929 - protein, 504 aa, Homo sapiens
MSQPRTPEQALDTPGDCPPGRRDEDAGEGIQCSQRMLSFSDALLSIIATVMILPVTHTEISPEQQFDRSVQRLLATRIAVYLMTFLIVTVAWAAHTRLFQVVGKTDDTLALLNLACMMTITFLPYTFSLMVTFPDVPLGIFLFCVCVIAIGVVQALIVGYAFHFPHLLSPQIQRSAHRALYRRHVLGIVLQGPALCFAAAIFSLFFVPLSYLLMVTVILLPYVSKVTGWCRDRLLGHREPSAHPVEVFSFDLHEPLSKERVEAFSDGVYAIVATLLILDICEDNVPDPKDVKERFSGSLVAALSATGPRFLAYFGSFATVGLLWFAHHSLFLHVRKATRAMGLLNTLSLAFVGGLPLAYQQTSAFARQPRDELERVRVSCTIIFLASIFQLAMWTTALLHQAETLQPSVWFGGREHVLMFAKLALYPCASLLAFASTCLLSRFSVGIFHLMQIAVPCAFLLLRLLVGLALATLRVLRGLARPEHPPPAPTGQDDPQSQLLPAPC

SEQ ID NO: 4930 - protein, 348 aa, Homo sapiens
MTTALEPEDQKGLLIIKAEDHYWGQDSSSQKCSPHRRELYRQHFRKLCYQDAPGPREALTQLWELCRQWLRPECHTKEQILDLLVLEQFLSILPKDLQAWVRAHHPETGEEAVTVLEDLERELDEPGKQVPGNSERRDILMDKLAPLGRPYESLTVQLHPKKTQLEQEAGKPQRNGDKTRTKNEELFQKEDMPKDKEFLGEINDRLNKDTPQHPKSKDIIENEGRSEWQQRERRRYKCDECGKSFSHSSDLSKHRRTHTGEKPYKCDECGKAFIQRSHLIGHHRVHTGVKPYKCKECGKDFSGRTGLIQHQRIHTGEKPYECDECGRPFRVSSALIRHQRIHTANKLY

SEQ ID NO: 4931 - protein, 482 aa, Homo sapiens
MASFSAETNSTDLLSQPWNEPPVILSMVILSLTFLLGLPGNGLVLWVAGLKMQRTVNTIWFLHLTLADLLCCLSLPFSLAHLALQGQWPYGRFLCKLIPSIIVLNMFASVFLLTAISLDRCLVVFKPIWCQNHRNVGMACSICGCIWVVAFVMCIPVFVYREIFTTDNHNRCGYKFGLSSSLDYPDFYGDPLENRSLENIVQPPGEMNDRLDPSSFQTNDHPWTVPTVFQPQTFQRPSADSLPRGSARLTSQNLYSNVFKPADVVSPKIPSGFPIEDHETSPLDNSDAFLSTHLKLFPSASSNSFYESELPQGFQDYYNLGQFTDDDQVPTPLVAITITRLVVGFLLPSVIMIACYSFIVFRMQRGRFAKSQSKTFRVAVVVVAVFLVCWTPYHIFGVLSLLTDPETPLGKTLMSWDHVCIALASANSCFNPFLYALLGKDFRKKARQSIQGILEAAFSEELTRSTHCPSNNVISERNSTTV

SEQ ID NO: 4932 - protein, 499 aa, Homo sapiens
MSLADELLADLEEAAEEEEGGSYGEEEEEPAIEDVQEETQLDLSGDSVKTIAKLWDSKMFAEIMMKIEEYISKQAKASEVMGPVEAAPEYRVIVDANNLTVEIENELNIIHKFIRDKYSKRFPELESLVPNALDYIRTVKELGNSLDKCKNNENLQQILTNATIMVVSVTASTTQGQQLSEEELERLDEACDMALELNASKHRIYEYVESRMSFIAPNLSIIIGASTAAKIMGVAGGLTNLSKMPACNIMLLGAQRKTLSGFSSTSVLPHTGYIYHSDIVQSLPPDLRRKAARLVAAKCTLAARVDSFHESTEGKVGYELKDEIERKFDKWQEPPPVKQVKPLPAPLDGQRKKRGGRRYRKMKERLGLTEIRKQANRMSFGEIEEDAYQEDLGFSLGHLGKSGSGRVRQTQVNEATKARISKTLQRTLQKQSVVYGGKSTIRDRSSGTASSVAFTPLQGLEIVNPQAAEKKVAEANQKYFSSMAEFLKVKGEKSGLMST

SEQ ID NO: 4933 - protein, 213 aa, Homo sapiens
MSRVLVPCHVKGSVALQVGDVRTSQGRPGVLVIDVTFPSVAPFELQEITFKNYYTAFLSIRVRQYTSAHTPAKWVTCLRDYCLMPDPHSEEGAQEYVSLFKHQMLCDMARISELRLILRQPSPLWLSFTVEELQIYQQGPKSPSVTFPKWLSHPVPCEQPALLREGLPDPSRVSSEVQQMWALTEMIRASHTSARIGRFDVDGCYDLNLLSYT

SEQ ID NO: 4934 - protein, 323 aa, Homo sapiens
MADLDKLNIDSIIQRLLEVRGSKPGKNVQLQENEIRGLCLKSREIFLSQPILLELEAPLKICGDIHGQYYDLLRLFEYGGFPPESNYLFLGDYVDRGKQSLETICLLLAYKIKYPENFFLLRGNHECASINRIYGFYDECKRRYNIKLWKTFTDCFNCLPIAAIVDEKIFCCHGGLSPDLQSMEQIRRIMRPTDVPDQGLLCDLLWSDPDKDVLGWGENDRGVSFTFGAEVVAKFLHKHDLDLICRAHQVVEDGYEFFAKRQLVTLFSAPNYCGEFDNAGAMMSVDETLMCSFQILKPAEKKKPNATRPVTPPRGMITKQAKK

SEQ ID NO: 4935 - protein, 1214 aa, Homo sapiens
MKQPIMADGPRCKRRKQANPRRKNVVNYDNVVDTGSETDEEDKLHIAEDDGIANPLDQETSPASVPNHESSPHVSQALLPREEEEDEIREGGVEHPWHNNEILQASVDGPEEMKEDYDTMGPEATIQTAINNGTVKNANCTSDFEEYFAKRKLEERDGHAVSIEEYLQRSDTAIIYPEAPEELSRLGTPEANGQEENDLPPGTPDAFAQLLTCPYCDRGYKRLTSLKEHIKYRHEKNEENFSCPLCSYTFAYRTQLERHMVTHKPGTDQHQMLTQGAGNRKFKCTECGKAFKYKHHLKEHLRIHSGEKPYECPNCKKRFSHSGSYSSHISSKKCIGLISVNGRMRNNIKTGSSPNSVSSSPTNSAITQLRNKLENGKPLSMSEQTGLLKIKTEPLDFNDYKVLMATHGFSGTSPFMNGGLGATSPLGVHPSAQSPMQHLGVGMEAPLLGFPTMNSNLSEVQKVLQIVDNTVSRQKMDCKAEEISKLKGYHMKDPCSQPEEQGVTSPNIPPVGLPVVSHNGATKSIIDYTLEKVNEAKACLQSLTTDSRRQISNIKKEKLRTLIDLVTDDKMIENHNISTPFSCQFCKESFPGPIPLHQHERYLCKMNEEIKAVLQPHENIVPNKAGVFVDNKALLLSSVLSEKGMTSPINPYKDHMSVLKAYYAMNMEPNSDELLKISIAVGLPQEFVKEWFEQRKVYQYSNSRSPSLERSSKPLAPNSNPPTKDSLLPRSPVKPMDSITSPSIAELHNSVTNCDPPLRLTKPSHFTNIKPVEKLDHSRSNTPSPLNLSSTSSKNSHSSSYTPNSFSSEELQAEPLDLSLPKQMKEPKSIIATKNKTKASSISLDHNSVSSSSENSDEPLNLTFIKKEFSNSNNLDNKSTNPVFSMNPFSAKPLYTALPPQSAFPPATFMPPVQTSIPGLRPYPGLDQMSFLPHMAYTYPTGAATFADMQQRRKYQRKQGFQGELLDGAQDYMSGLDDMTDSDSCLSRKKIKKTESGMYACDLCDKTFQKSSSLLRHKYEHTGKRPHQCQICKKAFKHKHHLIEHSRLHSGEKPYQCDKCGKRFSHSGSYSQHMNHRYSYCKREAEEREAAEREAREKGHLEPTELLMNRAYLQSITPQGYSDSEERESMPRDGESEKEHEKEGEDGYGKLGRQDGDEEFEEEEEESENKSMDTDPETIRDEEETGDHSMDDSSEDGKMETKSDHEEDNMEDGM

SEQ ID NO: 4936 - protein, 1215 aa, Homo sapiens
MEQLPGVPPGPPHPVRPPPPPPPPMPLQLEAHLRSHGLEPAAPSPRLRPEESLDPPGAMQELLGALEPLPPAPGDTGVGPPNSEGKDPAGAYRSPSPQGTKAPRFVPLTSICFPDSLLQDEERSFFPTMEEMFGGGAADDYGKAGPPEDEGDPKAGAGPPPGPPAYDPYGPYCPGRASGAGPETPGLGLDPNKPPELPSTVNAEPLGLIQSGPHQAAPPPPPPPPPPPAPASEPKGGLTSPIFCSTKPKKLLKTSSFHLLRRRDPPFQTPKKLYAQEYEFEADEDKADVPADIRLNPRRLPDLVSSCRSRPALSPLGDIDFCPPNPGPDGPRRRGRKPTKAKRDGPPRPRGRPRIRPLEVPTTAGPASASTPTDGAKKPRGRGRGRGRKAEEAGGTRLEPLKPLKIKLSVPKAGEGLGTSSGDAISGTDHNSLDSSLTREKIEAKIKEVEEKQPEMKSGFMASFLDFLKSGKRHPPLYQAGLTPPLSPPKSVPPSVPARGLQPQPPATPAVPHPPPSGAFGLGGALEAAESEGLGLGCPSPCKRLDEELKRNLETLPSFSSDEEDSVAKNRDLQESISSAISALDDPPLAGPKDTSTPDGPPLAPAAAVPGPPPLPGLPSANSNGTPEPPLLEEKPPPTPPPAPTPQPQPPPPPPPPQPALPSPPPLVAPTPSSPPPPPLPPPPPPAMPSPPPPPPPAAAPLAAPPEEPAAPSPEDPELPDTRPLHLAKKQETAAVCGETDEEAGESGGEGIFRERDEFVIRAEDIPSLKLALQTGREPPPIWRVQKALLQKFTPEIKDGQRQFCATSNYLGYFGDAKNRYQRLYVKFLENVNKKDYVRVCARKPWHRPPVPVRRSGQAKNPVSAGGSSAPPPKAPAPPPKPETPEKTTSEKPPEQTPETAMPEPPAPEKPSLLRPVEKEKEKEKVTRGERPLRGERATSGRQTRPERSLATGQPATSRLPKARPTKVKAEPPPKKRKKWLKEAGGNATAGGGPPGSSSDSESSPGAPSEDERAVPGRLLKTRAMREMYRSYVEMLVSTALDPDMIQALEDTHDELYLPPMRKIDGLLNEHKKKVLKRLSLSPALQDALHTFPQLQVEQSGEGSPEEGAVRLRPAGEPYNRKTLSKLKRSVVRAQEFKVELEKSGYYTLYHSLHHYKYHTFLRCRDQTLAIEGGAEDLGQEEVVQQCMRNQPWLEQLFDSFSDLLAQAQAHSRCG

SEQ ID NO: 4937 - protein, 690 aa, Homo sapiens
MKSGFMASFLDFLKSGKRHPPLYQAGLTPPLSPPKSVPPSVPARGLQPQPPATPAVPHPPPSGAFGLGGALEAAESEGLGLGCPSPCKRLDEELKRNLETLPSFSSDEEDSVAKNRDLQESISSAISALDDPPLAGPKDTSTPDGPPLAPAAAVPGPPPLPGLPSANSNGTPEPPLLEEKPPPTPPPAPTPQPQPPPPPPPPQPALPSPPPLVAPTPSSPPPPPLPPPPPPAMPSPPPPPPPAAAPLAAPPEEPAAPSPEDPELPDTRPLHLAKKQETAAVCGETDEEAGESGGEGIFRERDEFVIRAEDIPSLKLALQTGREPPPIWRVQKALLQKFTPEIKDGQRQFCATSNYLGYFGDAKNRYQRLYVKFLENVNKKDYVRVCARKPWHRPPVPVRRSGQAKNPVSAGGSSAPPPKAPAPPPKPETPEKTTSEKPPEQTPETAMPEPPAPEKPSLLRPVEKEKEKEKVTRGERPLRGERATSGRQTRPERSLATGQPATSRLPKARPTKVKAEPPPKKRKKWLKEAGGNATAGGGPPGSSSDSESSPGAPSEDERAVPGRLLKTRAMREMYRSYVEMLVSTALDPDMIQALEDTHGDKLKRSVVRAQEFKVELEKSGYYTLYHSLHHYKYHTFLRCRDQTLAIEGGAEDLGQEEVVQQCMRNQPWLEQLFDSFSDLLAQAQAHSRCG

SEQ ID NO: 4938 - protein, 1215 aa, Homo sapiens; identical to SEQ ID NO: 4936

SEQ ID NO: 4939 - protein, 690 aa, Homo sapiens; identical to SEQ ID NO: 4937

SEQ ID NO: 4940 - protein, 1223 aa, Homo sapiens
MEQLPGVPPGPPHPVRPPPPNPPPPPPPPPPPMPLQLEAHLRSHGLEPAAPSPRLRPEESLDPPGAMQELLGALEPLPPAPGDTGVGPPNSEGKDPAGAYRSPSPQGTKAPRFVPLTSICFPDSLLQDEERSFFPTMEEMFGGGAADDYGKAGPPEDEGDPKAGAGPPPGPPAYDPYGPYCPGRASGAGPETPGLGLDPNKPPELPSTVNAEPLGLIQSGPHQAAPPPPPPPPPPPAPASEPKGGLTSPIFCSTKPKKLLKTSSFHLLRRRDPPFQTPKKLYAQEYEFEADEDKADVPADIRLNPRRLPDLVSSCRSRPALSPLGDIDFCPPNPGPDGPRRRGRKPTKAKRDGPPRPRGRPRIRPLEVPTTAGPASASTPTDGAKKPRGRGRGRGRKAEEAGGTRLEPLKPLKIKLSVPKAGEGLGTSSGDAISGTDHNSLDSSLTREKIEAKIKEVEEKQPEMKSGFMASFLDFLKSGKRHPPLYQAGLTPPLSPPKSVPPSVPARGLQPQPPATPAVPHPPPSGAFGLGGALEAAESEGLGLGCPSPCKRLDEELKRNLETLPSFSSDEEDSVAKNRDLQESISSAISALDDPPLAGPKDTSTPDGPPLAPAAAVPGPPPLPGLPSANSNGTPEPPLLEEKPPPTPPPAPTPQPQPPPPPPPPQPALPSPPPLVAPTPSSPPPPPLPPPPPPAMPSPPPPPPPAAAPLAAPPEEPAAPSPEDPELPDTRPLHLAKKQETAAVCGETDEEAGESGGEGIFRERDEFVIRAEDIPSLKLALQTGREPPPIWRVQKALLQKFTPEIKDGQRQFCATSNYLGYFGDAKNRYQRLYVKFLENVNKKDYVRVCARKPWHRPPVPVRRSGQAKNPVSAGGSSAPPPKAPAPPPKPETPEKTTSEKPPEQTPETAMPEPPAPEKPSLLRPVEKEKEKEKVTRGERPLRGERATSGRQTRPERSLATGQPATSRLPKARPTKVKAEPPPKKRKKWLKEAGGNATAGGGPPGSSSDSESSPGAPSEDERAVPGRLLKTRAMREMYRSYVEMLVSTALDPDMIQALEDTHDELYLPPMRKIDGLLNEHKKKVLKRLSLSPALQDALHTFPQLQVEQSGEGSPEEGAVRLRPAGEPYNRKTLSKLKRSVVRAQEFKVELEKSGYYTLYHSLHHYKYHTFLRCRDQTLAIEGGAEDLGQEEVVQQCMRNQPWLEQLFDSFSDLLAQAQAHSRCG

SEQ ID NO: 4941 - protein, 440 aa, Homo sapiens
MMADEEEEVKPILQKLQELVDQLYSFRDCYFETHSVEDAGRKQQDVRKEMEKTLQQMEEVVGSVQGKAQVLMLTGKALNVTPDYSPKAEELLSKAVKLEPELVEAWNQLGEVYWKKGDVAAAHTCFSGALTHCRNKVSLQNLSMVLRQLRTDTEDEHSHHVMDSVRQAKLAVQMDVHDGRSWYILGNSYLSLYFSTGQNPKISQQALSAYAQAEKVDRKASSNPDLHLNRATLHKYEESYGEALEGFSRAAALDPAWPEPRQREQQLLEFLDRLTSLLESKGKVKTKKLQSMLGSLRPAHLGPCSDGHYQSASGQKVTLELKPLSTLQPGVNSGAVILGKVVFSLTTEEKVPFTFGLVDSDGPCYAVMVYNIVQSWGVLIGDSVAIPEPNLRLHRIQHKGKDYSFSSVRVETPLLLVVNGKPQGSSSQAVATVASRPQCE

SEQ ID NO: 4942 - protein, 364 aa, Homo sapiens
MNRAPLKRSRILHMALTGASDPSAEAEANGEKPFLLRALQIALVVSLYSVTSISMVFLNKYLLDSPSLRLDTPIFVTFYQCLVTTLLCKGLSALAACCPGAVDFPSLRLDLRVARSVLPLSVVFIGMITFNNLCLKYVGVAFYNVGRSLTTVFNVLLSYLLLKQTTSFYALLTCGIIIGGFWLGVDQEGAEGTLSWLGTVFGVLASLCVSLNAIYTTKVLPAVDGSIWRLTFYNNVNACILFLPLLLLLGELQALRDFAQLGSAHFWGMMTLGGLFGFAIGYVTGLQIKFTSPLTHNVSGTAKACAQTVLAVLYYEETKSFLWWTSNMMVLGGSSAYTWVRGWEMKKTPEEPSPKDSEKSAMGV

SEQ ID NO: 4943 - protein, 1431 aa, Homo sapiens
MTVFRQENVDDYYDTGEELGSGQFAVVKKCREKSTGLQYAAKFIKKRRTKSSRRGVSREDIEREVSILKEIQHPNVITLHEVYENKTDVILILELVAGGELFDFLAEKESLTEEEATEFLKQILNGVYYLHSLQIAHFDLKPENIMLLDRNVPKPRIKIIDFGLAHKIDFGNEFKNIFGTPEFVAPEIVNYEPLGLEADMWSIGVITYILLSGASPFLGDTKQETLANVSAVNYEFEDEYFSNTSALAKDFIRRLLVKDPKKRMTIQDSLQHPWIKPKDTQQALSRKASAVNMEKFKKFAARKKWKQSVRLISLCQRLSRSFLSRSNMSVARSDDTLDEEDSFVMKAIIHAINDDNVPGLQHLLGSLSNYDVNQPNKHGTPPLLIAAGCGNIQILQLLIKRGSRIDVQDKGGSNAVYWAARHGHVDTLKFLSENKCPLDVKDKSGEMALHVAARYGHADVAQVTCAASAQIPISRTKEEETPLHCAAWHGYYSVAKALCEAGCNVNIKNREGETPLLTASARGYHDIVECLAEHGADLNACDKDGHIALHLAVRRCQMEVIKTLLSQGCFVDYQDRHGNTPLHVACKDGNMPIVVALCEANCNLDISNKYGRTPLHLAANNGILDVVRYLCLMGASVEALTTDGKTAEDLARSEQHEHVAGLLARLRKDTHRGLFIQQLRPTQNLQPRIKLKLFGHSGSGKTTLVESLKCGLLRSFFRRRRPRLSSTNSSRFPPSPLASKPTVSVSINNLYPGCENVSVRSRSMMFEPGLTKGMLEVFVAPTHHPHCSADDQSTKAIDIQNAYLNGVGDFSVWEFSGNPVYFCCYDYFAANDPTSIHVVVFSLEEPYEIQLNPVIFWLSFLKSLVPVEEPIAFGGKLKNPLQVVLVATHADIMNVPRPAGGEFGYDKDTSLLKEIRNRFGNDLHISNKLFVLDAGASGSKDMKVLRNHLQEIRSQIVSVCPPMTHLCEKIISTLPSWRKLNGPNQLMSLQQFVYDVQDQLNPLASEEDLRRIAQQLHSTGEINIMQSETVQDVLLLDPRWLCTNVLGKLLSVETPRALHHYRGRYTVEDIQRLVPDSDVEELLQILDAMDICARDLSSGTMVDVPALIKTDNLHRSWADEEDEVMVYGGVRIVPVEHLTPFPCGIFHKVQVNLCRWIHQQSTEGDADIRLWVNGCKLANRGAELLVLLVNHGQGIEVQVRGLETEKIKCCLLLDSVCSTIENVMATTLPGLLTVKHYLSPQQLREHHEPVMIYQPRDFFRAQTLKETSLTNTMGGYKESFSSIMCFGCHDVYSQASLGMDIHASDLNLLTRRKLSRLLDPPDPLGKDWCLLAMNLGLPDLVAKYNTNNGAPKDFLPSPLHALLREWTTYPESTVGTLMSKLRELGRRDAADLLLKASSVFKINLDGNGQEAYASSCNSGTSYNSISSVVSR

SEQ ID NO: 4944 - protein, 1047 aa, Homo sapiens
MAEKRPLRTLGPVMYGKLPRLETDSGLEHSLPHSVGNQDPCTYKGSYFSCPMAGTPKAESEQLASWTPYPPLYSTGMAGPPLQADNLLTNCLFYRSPAEGPEKMQDSSPVELLPFSPQAHSYPGPPLAAPKPVYRNPLCYGLSTCLGEGAVKRPLDVDWTLATGPLLPSADPPCSLAPAPSKGQTLDGTFLRGVPAEGSSKDSSGSFSPCQPFLEKYQTIHSTGFLASRYTGPYPRNSKQAMSEGPSSPWTQLAQPLGPPCQDTGPTHYPPPHHPPPHPPQALPCPPACRHPEKQGSYSPALPLQPLGGHKGTGYQAGGLGSPYLRQQAAQAPYIPPLGLDAYPYPSAPLPAPSPGLKLEPPLTPRCPLDFAPQTLSFPYARDDLSLYGASPGLGGTPPSQNNVRAVPQPGAFQRACQPLPASQPCSEPVRPAQEAEEKTWLPSCRKEKLQPRLSEHSGPPIVIRDSPVPCTPPALPPCARECQSLPQKEDARPPSSPPMPVIDNVFSLAPYRDYLDVPAPEATTEPDSATAEPDSAPATSEGQDKGCRGTLPAQEGPSGSKPLRGSLKEEVALDLSVRKPTAEASPVKASRSVEHAKPTAAMDVPDVGNMVSDLPGLKKIDTEAPGLPGVPVTTDAMPRTNFHSSVAFMFRKFKILRPAPLPAAVVPSTPTSAPAPTQPAPTPTSGPIGLRILAQQPLSVTCFSLALPSPPAVAVASPAPAPAPSPAPARAQAPASARDPAPAPAPVAGPAPASTSAPGDSLEQHFTGLHASLCDAISGSVAHSPPEKLREWLETAGPWGQAAWQDCQGVQGLLAKLLSQLQRFDRTHRCPFPHVVRAGAIFVPIHLVKERLFPRLPPASVDHVLQEHRVELRPTTLSEERALRELALPGCTSRMLKLLALRQLPDIYPDLLGLQWRDCVRRQLGDFDTEAGAVSSSEPTVARDEPESLALAQKSPAPKVRKPGRKPPTPGPEKAEAAAGEESCGASPTPATSASPPGPTLKARFRSLLETAWLNGLALPTWGHKSSRPDQPSPCPQLLDSQSHHL

SEQ ID NO: 4945 - protein, 366 aa, Homo sapiens
MAGPAWISKVSRLLGAFHNPKQVTRGFTGGVQTVTLIPGDGIGPEISAAVMKIFDAAKAPIQWEERNVTAIQGPGGKWMIPSEAKESMDKNKMGLKGPLKTPIAAGHPSMNLLLRKTFDLYANVRPCVSIEGYKTPYTDVNIVTIRENTEGEYSGIEHVIVDGVVQSIKLITEGASKRIAEFAFEYARNNHRSNVTAVHKANIMRMSDGLFLQKCREVAESCKDIKFNEMYLDTVCLNMVQDPSQFDVLVMPNLYGDILSDLCAGLIGGLGVTPSGNIGANGVAIFESVHGTAPDIAGKDMANPTALLLSAVMMLRHMGLFDHAARIEAACFATIKDGKSLTKDLGGNAKCSDFTEEICRRVKDLD

SEQ ID NO: 4946 - protein, 552 aa, Homo sapiens
MGKVNVAKLRYMSRDDFRVLTAVEMGMKNHEIVPGSLIASIASLKHGGCNKVLRELVKHKLIAWERTKTVQGYRLTNAGYDYLALKTLSSRQVVESVGNQMGVGKESDIYIVANEEGQQFALKLHRLGRTSFRNLKNKRDYHKHRHNVSWLYLSRLSAMKEFAYMKALYERKFPVPKPIDYNRHAVVMELINGYPLCQIHHVEDPASVYDEAMELIVKLANHGLIHGDFNEFNLILDESDHITMIDFPQMVSTSHPNAEWYFDRDVKCIKDFFMKRFSYESELFPTFKDIRREDTLDVEVSASGYTKEMQADDELLHPLGPDDKNIETKEGSEFSFSDGEVAEKAEVYRSENESERNCLEESEGCYCRSSGDPEQIKEDSLSEESADARSFEMTEFNQALEEIKGQVVENNSVTEFSEEKNRTENYNRQDGQRVQGGVPAGSDEYEDECPHLIALSSLNREFRPFRDEENVGAMNQYRTRTLSITSSGSAVSCSTIPPELVKQKVKRQLTKQQKSAVRRRLQKGEANIFTKQRRENMQNIKSSLEAASFWGE

SEQ ID NO: 4947 - protein, 267 aa, Homo sapiens
MHYIKTWSLLGEMSEKLRRCRKELTAAIDRAFEGVSYSQECTGQQRLELSAAPLSFSLPVHRLLCRRHPLAACSSAAPFAAVPCAPENENPAFATNHAPVNAKPHALCPERKPLTSKENVLMHSSILAPERESWRTAGEGENWRKENLRKDMERDLKADSNMPLNNSSQEVTKDLLDMIDHTSIRTIEELAGKIEFENELNHMCGHCQDSPFKEEAWALLMDKSPQKATDADPGSLKQAFDDHNIVETVLDLEEDYNVMTSFKYQIE

SEQ ID NO: 4948 - protein, 424 aa, Homo sapiens
MAGTRWVLGALLRGCGCNCSSCRRTGAACLPFYSAASYPALRASLLPQSLAAAAAVPTRSYSQESKTTYLEDLPPPPEYELAPSKLEEEVDDVFLIRAQGLPWSCTMEDVLNFFSDCRIRNGENGIHFLLNRDGKRRGDALIEMESEQDVQKALEKHRMYMGQRYVEVYEINNEDVDALMKSLQVKSSPVVNDGVVRLRGLPYSCNEKDIVDFFAGLNIVDITFVMDYRGRRKTGEAYVQFEEPEMANQALLKHREEIGNRYIEIFPSRRNEVRTHVGSYKGKKIASFPTAKYITEPEMVFEEHEVNEDIQPMTAFESEKEIELPKEVPEKLPEAADFGTTSSLHFVHMRGLPFQANAQDIINFFAPLKPVRITMEYSSSGKATGEADVHFETHEDAVAAMLKDRSHVHHRYIELFLNSCPKGK

SEQ ID NO: 4949 - protein, 1132 aa, Homo sapiens
MGANASNYPHSCSPRVGGNSQAQQTFIGTSSYSQQGYGCESKLYSLDHGHEKPQDKKKRTSGLATLKKKFIKRRKSNRSADHAKQMRELLSGWDVRDVNALVEEYEGTSALKELSLQASLARPEARTLQKDMADLYEYKYCTDVDLIFQETCFPVHRAILAARCPFFKTLLSSSPEYGAEIIMDINTAGIDMPMFSALLHYLYTGEFGMEDSRFQNVDILVQLSEEFGTPNSLDVDMRGLFDYMCYYDVVLSFSSDSELVEAFGGNQNCLDEELKAHKAVISARSPFFRNLLQRRIRTGEEITDRTLRTPTRIILDESIIPKKYATVILHCMYTDVVDLSVLHCSPSVGSLSEVQALVAGKPNMTRAEEAMELYHIALFLEFNMLAQGCEDIIAESISLDTLIAILKWSSHPYGSKWVHRQALHFLCEEFSQVMTSDVFYELSKDHLLTAIQSDYLQASEQDILKYLIKWGEHQLMKRIADREPNLLSGTAHSVNKRGVKRRDLDMEELREILSSLLPFVRIEHILPINSEVLSDAMKRGLISTPPSDMLPTTEGGKSNAWLRQKNAGIYVRPRLFSPYVEEAKSVLDEMMVEQTDLVRLRMVRMSNVPDTLYMVNNAVPQCCHMISHQQISSNQSSPPSVVANEIPVPRLLIMKDMVRRLQELRHTEQVQRAYALNCGEGATVSYEIQIRVLREFGLADAAAELLQNPHKFFPDERFGDESPLLTMRQPGRCRVNSTPPAETMFTDLDSFVAFHPPLPPPPPPYHPPATPIHNQLKAGWKQRPPSQHPSRSFSYPCNHSLFHSRTAPKAGPPPVYLPSVKAAPPDCTSTAGLGRQTVAAAAATTTSTATAAAAAASEKQVRTQPVLNDLMPDIAVGVSTLSLKDRRLPELAVDTELSQSVSEAGPGPPQHLSCIPQRHTHTSRKKHTLEQKTDTRENPQEYPDFYDFSNAACRPSTPALSRRTPSPSQGGYFGPDLYSHNKASPSGLKSAYLPGQTSPKKQEEARREYPLSPDGHLHRQKNEPIHLDVVEQPPQRSDFPLAAPENASTGPAHVRGRTAVETDLTFGLTPNRPSLSACSSEAPEERSGRRLADSESLGHGAQRNTDLEREDSISRGRRSPSKPDFLYKKSAL

SEQ ID NO: 4950 - protein, 410 aa, Homo sapiens
MGANASNYPHSCSPRVGGNSQAQQTFIGTSSYSQQGYGCESKLYSLDHGHEKPQDKKKRTSGLATLKKKFIKRRKSNRSADHAKQMRELLSGWDVRDVNALVEEYEGTSALKELSLQASLARPEARTLQKDMADLYEYKYCTDVDLIFQETCFPVHRAILAARCPFFKTLLSSSPEYGAEIIMDINTAGIDMPMFSALLHYLYTGEFGMEDSRFQNVDILVQLSEEFGTPNSLDVDMRGLFDYMCYYDVVLSFSSDSELVEAFGGNQNCLDEELKAHKAVISARSPFFRNLLQRRIRTGEEITDRTLRTPTRIILDESIIPKKYATVILHCMYTDVVDLSVLHCSPSVGSLSEVQALVAGKPNMTRAEEAMELYHIALFLEFNMLAQEETTVIRPACAAELSNSCLLPQS

SEQ ID NO: 4951 - protein, 786 aa, Homo sapiens
MVHFCGLLTLHREPVPLKSISVSVNIYEFVAGVSATLNYENEEKVPLEAFFVFPMDEDSAVYSFEALVDGKKIVAELQDKMKARTNYEKAISQGHQAFLLEGDSSSRDVFSCNVGNLQPGSKAAVTLKYVQELPLEADGALRFVLPAVLNPRYQFSGSSKDSCLNVKTPIVPVEDLPYTLSMVATIDSQHGIEKVQSNCPLSPTEYLGEDKTSAQVSLAAGHKFDRDVELLIYYNEVHTPSVVLEMGMPNMKPGHLMGDPSAMVSFYPNIPEDQPSNTCGEFIFLMDRSGSMQSPMSSQDTSQLRIQAAKETLILLLKSLPIGCYFNIYGFGSSYEACFPESVKYTQQTMEEALGRVKLMQADLGGTEILAPLQNIYRGPSIPGHPLQLFVFTDGEVTDTFSVIKEVRINRQKHRCFSFGIGEGTSTSLIKGIARASGGTSEFITGKDRMQSKALRTLKRSLQPVVEDVSLSWHLPPGLSAKMLSPEQTVIFRGQRLISYAQLTGRMPAAETTGEVCLKYTLQGKTFEDKVTFPLQPKPDVNLTIHRLAAKSLLQTKDMGLRETPASDKKDALNLSLESGVISSFTAFIAINKELNKPVQGPLAHRDVPRPILLGASAPLKIKCQSGFRKALHSDRPPSASQPRGELMCYKAKTFQMDDYSLCGLISHKDQHSPGFGENHLVQLIYHQNANGSWDLNEDLAKILGMSLEEIMAAQPAELVDSSGWATILAVIWLHSNGKDLKCEWELLERKAVAWMRAHAGSTMPSVVKAAITFLKSSVDPAIFAF

SEQ ID NO: 4952 - protein, 415 aa, Homo sapiens
MVHFCGLLTLHREPVPLKSISVSVNIYEFVAGVSATLNYENEEKVPLEAFFVFPMDEDSAVYSFEALVDGKKIVAELQDKMKARTNYEKAISQGHQAFLLEGDSSSRDVFSCNVGNLQPGSKAAVTLKYVQELPLEADGALRFVLPAVLNPRYQFSGSSKDSCLNVKTPIVPVEDLPYTLSMVATIDSQHGIEKVQSNCPLSPTEYLGEDKTSAQVSLAAGHKFDRDVELLIYYNEVHTPSVVLEMGMPNMKPGHLMGDPSAMVSFYPNIPEDQPSNTCGEFIFLMDRSGSMQSPMSSQDTSQLRIQAAKETLILLLKSLPIGCYFNIYGFGSSYEACFPESVKYTQQTMEEALGRVKLMQADLGGTEILAPLQNIYRGPSIPGHPLQLFVFTDGEVTDTFSVIKEVRINRQKHR

SEQ ID NO: 4953 - protein, 289 aa, Homo sapiens
MPEDLALESNPSDHPRASTIFLSKSQTDVREKRKSNHLNHVSPGQLTKKYSSCSTIFLDDSTVSQPNLRTTVKCVTLAIYYHIKNRDANRSLDIFDERSHPLTREKVPEEYFKHDPEHKFIYRFVRTLFSAAQLTAECAIVTLVYLERLLTYAEIDICPTNWKRIVLGAILLASKVWDDQAVWNVDYCQILKDITVEDMNEMERHFLELLQFNINVPASVYAKYYFDLRSLADDNNLNFLFAPLSKERAQNLEAISRLCEDKDLCRAAMRRSFSADNFIGIQRSKAILS

SEQ ID NO: 4954 - protein, 459 aa, Homo sapiens
MKRKSERRSSWAAAPPCSRRCSSTSPGVKKIRSSTQQDPRRRDPQDDVYLDITDRLCFAILYSRPKSASNVHYFSIDNELEYENFYADFGPLNLAMVYRYCCKINKKLKSITMLRKKIVHFTGSDQRKQANAAFLVGCYMVIYLGRTPEEAYRILIFGETSYIPFRDAAYGSCNFYITLLDCFHAVKKAMQYGFLNFNSFNLDEYEHYEKAENGDLNWIIPDRFIAFCGPHSRARLESGYHQHSPETYIQYFKNHNVTTIIRLNKRMYDAKRFTDAGFDHHDLFFADGSTPTDAIVKEFLDICENAEGAIAVHCKAGLGRTGTLIACYIMKHYRMTAAETIAWVRICRPGSVIGPQQQFLVMKQTNLWLEGDYFRQKLKGQENGQHRAAFSKLLSGVDDISINGVENQDQQEPEPYSDDDEINGVTQGDRLRALKSRRQSKTNAIPLTLSISRTKTVLR

SEQ ID NO: 4955 - protein, 498 aa, Homo sapiens
MKRKSERRSSWAAAPPCSRRCSSTSPGVKKIRSSTQQDPRRRDPQDDVYLDITDRLCFAILYSRPKSASNVHYFSIDNELEYENFYADFGPLNLAMVYRYCCKINKKLKSITMLRKKIVHFTGSDQRKQANAAFLVGCYMVIYLGRTPEEAYRILIFGETSYIPFRDAAYGSCNFYITLLDCFHAVKKAMQYGFLNFNSFNLDEYEHYEKAENGDLNWIIPDRFIAFCGPHSRARLESGYHQHSPETYIQYFKNHNVTTIIRLNKRMYDAKRFTDAGFDHHDLFFADGSTPTDAIVKEFLDICENAEGAIAVHCKAGLGRTGTLIACYIMKHYRMTAAETIAWVRICRPGSVIGPQQQFLVMKQTNLWLEGDYFRQKLKGQENGQHRAAFSKLLSGVDDISINGVENQDQQEPEPYSDDDEINGVTQGDRLRALKSRRQSKTNAIPLTVILQSSVQSCKTSEPNISGSAGITKRTTRSASRKSSVKSLSISRTKTVLR

SEQ ID NO: 4956 - protein, 109 aa, Homo sapiens
MAYQLYRNTTLGNSLQESLDELIQSQQITPQLALQVLLQFDKAINAALAQRVRNRVNFRGSLNTYRFCDNVWTFVLNDVEFREVTELIKVDKVKIVACDGKNTGSNTTE

SEQ ID NO: 4957 - protein, 753 aa, Homo sapiens
MADKRKLQGEIDRCLKKVSEGVEQFEDIWQKLHNAANANQKEKYEADLKKEIKKLQRLRDQIKTWVASNEIKDKRQLIDNRKLIETQMERFKVVERETKTKAYSKEGLGLAQKVDPAQKEKEEVGQWLTNTIDTLNMQVDQFESEVESLSVQTRKKKGDKDKQDRIEGLKRHIEKHRYHVRMLETILRMLDNDSILVDAIRKIKDDVEYYVDSSQDPDFEENEFLYDDLDLEDIPQALVATSPPSHSHMEDEIFNQSSSTPTSTTSSSPIPPSPANCTTENSEDDKKRGRSTDSEVSQSPAKNGSKPVHSNQHPQSPAVPPTYPSGPPPAASALSTTPGNNGVPAPAAPPSALGPKASPAPSHNSGTPAPYAQAVAPPAPSGPSTTQPRPPSVQPSGGGGGGSGGGGSSSSSNSSAGGGAGKQNGATSYSSVVADSPAEVALSSSGGNNASSQALGPPSGPHNPPPSTSKEPSAAAPTGAGGVAPGSGNNSGGPSLLVPLPVNPPSSPTPSFSDAKAAGALLNGPPQFSTAPEIKAPEPLSSLKSMAERAAISSGIEDPVPTLHLTERDIILSSTSAPPASAQPPLQLSEVNIPLSLGVCPLGPVPLTKEQLYQQAMEEAAWHHMPHPSDSERIRQYLPRNPCPTPPYHHQMPPPHSDTVEFYQRLSTETLFFIFYYLEGTKAQYLAAKALKKQSWRFHTKYMMWFQRHEEPKTITDEFEQGTYIYFDYEKWGQRKKEGFTFEYRYLEDRDLQ

SEQ ID NO: 4958 - protein, 520 aa, Homo sapiens
MVTSSFPISVAVFALITLQVGTQDSFIAAVYEHAVILPNKTETPVSQEDALNLMNENIDILETAIKQAAEQGARIIVTPEDALYGWKFTRETVFPYLEDIPDPQVNWIPCQDPHRFGHTPVQARLSCLAKDNSIYVLANLGDKKPCNSRDSTCPPNGYFQYNTNVVYNTEGKLVARYHKYHLYSEPQFNVPEKPELVTFNTAFGRFGIFTCFDIFFYDPGVTLVKDFHVDTILFPTAWMNVLPLLTAIEFHSAWAMGMGVNLLVANTHHVSLNMTGSGIYAPNGPKVYHYDMKTELGKLLLSEVDSHPLSSLAYPTAVNWNAYATTIKPFPVQKNTFRGFISRDGFNFTELFENAGNLTVCQKELCCHLSYRMLQKEENEVYVLGAFTGLHGRRRREYWQVCTMLKCKTTNLTTCGRPVETASTRFEMFSLSGTFGTEYVFPEVLLTEIHLSPGKFEVLKDGRLVNKNGSSGPILTVSLFGRWYTKDSLYSSCGTSNSAITYLLIFILLMIIALQNIVML

SEQ ID NO: 4959 - protein, 467 aa, Homo sapiens
MNENIDILETAIKQAAEQGARIIVTPEDALYGWKFTRETVFPYLEDIPDPQVNWIPCQDPHRFGHTPVQARLSCLAKDNSIYVLANLGDKKPCNSRDSTCPPNGYFQYNTNVVYNTEGKLVARYHKYHLYSEPQFNVPEKPELVTFNTAFGRFGIFTCFDIFFYDPGVTLVKDFHVDTILFPTAWMNVLPLLTAIEFHSAWAMGMGVNLLVANTHHVSLNMTGSGIYAPNGPKVYHYDMKTELGKLLLSEVDSHPLSSLAYPTAVNWNAYATTIKPFPVQKNTFRGFISRDGFNFTELFENAGNLTVCQKELCCHLSYRMLQKEENEVYVLGAFTGLHGRRRREYWQVCTMLKCKTTNLTTCGRPVETASTRFEMFSLSGTFGTEYVFPEVLLTEIHLSPGKFEVLKDGRLVNKNGSSGPILTVSLFGRWYTKDSLYSSCGTSNSAITYLLIFILLMIIALQNIVML

SEQ ID NO: 4960 - protein, 887 aa, Homo sapiens
MDWQPDEQGLQQVLQLLKDSQSPNTATQRIVQDKLKQLNQFPDFNNYLIFVLTRLKSEDEPTRSLSGLILKNNVKAHYQSFPPPVADFIKQECLNNIGDASSLIRATIGILITTIASKGELQMWPELLPQLCNLLNSEDYNTCEGAFGALQKICEDSSELLDSDALNRPLNIMIPKFLQFFKHCSPKIRSHAIACVNQFIMDRAQALMDNIDTFIEHLFALAVDDDPEVRKNVCRALVMLLEVRIDRLIPHMHSIIQYMLQRTQDHDENVALEACEFWLTLAEQPICKEVLASHLVQLIPILVNGMKYSEIDIILLKGDVEEDEAVPDSEQDIKPRFHKSRTVTLPHEAERPDGSEDAEDDDDDDALSDWNLRKCSAAALDVLANVFREELLPHLLPLLKGLLFHPEWVVKESGILVLGAIAEGCMQGMVPYLPELIPHLIQCLSDKKALVRSIACWTLSRYAHWVVSQPPDMHLKPLMTELLKRILDGNKRVQEAACSAFATLEEEACTELVPYLSYILDTLVFAFGKYQHKNLLILYDAIGTLADSVGHHLNQPEYIQKLMPPLIQKWNELKDEDKDLFPLLECLSSVATALQSGFLPYCEPVYQRCVTLVQKTLAQAMMYTQHPEQYEAPDKDFMIVALDLLSGLAEGLGGHVEQLVARSNIMTLLFQCMQDSMPEVRQSSFALLGDLTKACFIHVKPCIAEFMPILGTNLNPEFISVCNNATWAIGEICMQMGAEMQPYVQMVLNNLVEIINRPNTPKTLLENTAITIGRLGYVCPQEVAPMLQQFIRPWCTSLRNIRDNEEKDSAFRGICMMIGVNPGGVVQDFIFFCDAVASWVSPKDDLRDMFYKILHGFKDQVGEDNWQQFSEQFPPLLKERLAAFYGV

SEQ ID NO: 4961 - protein, 396 aa, Homo sapiens
MTNEEPLPKKVRLSETDFKVMARDELILRWKQYEAYVQALEGKYTDLNSNDVTGLRESEEKLKQQQQESARRENILVMRLATKEQEMQECTTQIQYLKQVQQPSVAQLRSTMVDPAINLFFLKMKGELEQTKDKLEQAQNELSAWKFTPDSQTGKKLMAKCRMLIQENQELGRQLSQGRIAQLEAELALQKKYSEELKSSQDELNDFIIQLDEEVEGMQSTILVLQQQLKETRQQLAQYQQQQSQASAPSTSRTTASEPVEQSEATSKDCSRLTNGPSNGSSSRQRTSGSGFHREGNTTEDDFPSSPGNGNKSSNSSEERTGRGGSGYVNQLSAGYESVDSPTGSENSLTHQSNDTDSSHDPQEEKAVSGKGNRTVGSRHVQNGLDSSVNVQGSVL

SEQ ID NO: 4962 - protein, 151 aa, Homo sapiens
MTNEEPLPKKVRLSETDFKVMARDELILRWKQYEAYVQALEGKYTDLNSNDVTGLRESEEKLKQQQQESARRENILVMRLATKEQEMQECTTQIQYLKQVQQPSVAQLRSTMVDPAINLFFLKMKGELEQTKDKLEQAQNELSAWKFTPDR

SEQ ID NO: 4963 - protein, 151 aa, Homo sapiens; identical to SEQ ID NO: 4962

SEQ ID NO: 4964 - protein, 466 aa, Homo sapiens
MADQLYLENIDEFVTDQNKIVTYKWLSYTLGVHVNQAKQMLYDYVERKRKENSGAQLHVTYLVSGSLIQNGHSCHKVAVVREDKLEAVKSKLAVTASIHVYSIQKAMLKDSGPLFNTDYDILKSNLQNCSKFSAIQCAAAVPRAPAESSSSSKKFEQSHLHMSSETQANNELTTNGHGPPASKQVSQQPKGIMGMFASKAAAKTQETNKETKTEAKEVTNASAAGNKAPGKGNMMSNFFGKAAMNKFKVNLDSEQAVKEEKIVEQPTVSVTEPKLATPAGLKKSSKKAEPVKVLQKEKKRGKRVALSDDETKETENMRKKRRRIKLPESDSSEDEVFPDSPGAYEAESPSPPPPPSPPLEPVPKTEPEPPSVKSSSGENKRKRKRVLKSKTYLDGEGCIVTEKVYESESCTDSEEELNMKTSSVHRPPAMTVKKEPREERKGPKKGTAALGKANRQVSITGFFQRK

SEQ ID NO: 4965 - protein, 1141 aa, Homo sapiens
MAAAVGVRGRYELPPCSGPGWLLSLSALLSVAARGAFATTHWVVTEDGKIQQQVDSPMNLKHPHDLVILMRQEATVNYLKELEKQLVAQKIHIEENEDRDTGLEQRHNKEDPDCIKAKVPLGDLDLYDGTYITLESKDISPEDYIDTESPVPPDPEQPDCTKILELPYSIHAFQHLRGVQERVNLSAPLLPKEDPIFTYLSKRLGRSIDDIGHLIHEGLQKNTSSWVLYNMASFYWRIKNEPYQVVECAMRALHFSSRHNKDIALVNLANVLHRAHFSADAAVVVHAALDDSDFFTSYYTLGNIYAMLGEYNHSVLCYDHALQARPGFEQAIKRKHAVLCQQKLEQKLEAQHRSLQRTLNELKEYQKQHDHYLRQQEILEKHKLIQEEQILRNIIHETQMAKEAQLGNHQICRLVNQQHSLHCQWDQPVRYHRGDIFENVDYVQFGEDSSTSSMMSVNFDVQSNQSDINDSVKSSPVAHSILWIWGRDSDAYRDKQHILWPKRADCTESYPRVPVGGELPTYFLPPENKGLRIHELSSDDYSTEEEAQTPDCSITDFRKSHTLSYLVKELEVRMDLKAKMPDDHARKILLSRINNYTIPEEEIGSFLFHAINKPNAPIWLILNEAGLYWRAVGNSTFAIACLQRALNLAPLQYQDVPLVNLANLLIHYGLHLDATKLLLQALAINSSEPLTFLSLGNAYLALKNISGALEAFRQALKLTTKCPECENSLKLIRCMQFYPFLYNITSSVCSGTVVEESNGSDEMENSDETKMSEEILALVDEFQQAWPLEGFGGALEMKGRRLDLQGIRVLKKGPQDGVARSSCYGDCRSEDDEATEWITFQVKRVKKPKGDHKKTPGKKVETGQIENGHRYQANLEITGPKVASPGPQGKKRDYQRLGWPSPDECLKLRWVELTAIVSTWLAVSSKNIDITEHIDFATPIQQPAMEPLCNGNLPTSMHTLDHLHGVSNRASLHYTGESQLTEVLQNLGKDQYPQQSLEQIGTRIAKVLEKNQTSWVLSSMAALYWRVKGQGKKAIDCLRQALHYAPHQMKDVPLISLANILHNAKLWNDAVIVATMAVEIAPHFAVNHFTLGNVYVAMEEFEKALVWYESTLKLQPEFVPAKNRIQTIQCHLMLKKGRRSP

SEQ ID NO: 4966 - protein, 154 aa, Homo sapiens
MGKDIRPRSARAACKGVGLWSGCFGKMAGSGVRQATSTASTFVKPIFSRDMNEAKRRVRELYRAWYREVPNTVHQFQLDITVKMGRDKVREMFMKNAHVTDPRVVDLLVIKGKIELEETIKVWKQRTHVMRFFHETEAPRPKDFLSKFYVGHDP

SEQ ID NO: 4967 - protein, 805 aa, Homo sapiens
MWDQGGQPWQQWPLNQQQWMQSFQHQQDPSQIDWAALAQAWIAQREASGQQSMVEQPPGMMPNGQDMSTMESGPNNHGNFQGDSNFNRMWQPEWGMHQQPPHPPPDQPWMPPTPGPMDIVPPSEDSNSQDSGEFAPDNRHIFNQNNHNFGGPPDNFAVGPVNQFDYQHGAAFGPPQGGFHPPYWQPGPPGPPAPPQNRRERPSSFRDRQRSPIALPVKQEPPQIDAVKRRTLPAWIREGLEKMEREKQKKLEKERMEQQRSQLSKKEKKATEDAEGGDGPRLPQRSKFDSDEEEEDTENVEAASSGKVTRSPSPVPQEEHSDPEMTEEEKEYQMMLLTKMLLTEILLDVTDEEIYYVAKDAHRKATKAPAKQLAQSSALASLTGLGGLGGYGSGDSEDERSDRGSESSDTDDEELRHRIRQKQEAFWRKEKEQQLLHDKQMEEEKQQTERVTKEMNEFIHKEQNSLSLLEAREADGDVVNEKKRTPNETTSVLEPKKEHKEKEKQGRSRSGSSSSGSPSSNSRTSSTSSTVSSSSYSSSSGSSRTSSRSSSPKRKKRHSRSRSPTIKARRSRSRSYSRRIKIESNRARVKIRDRRRSNRNSIERERRRNRSPSRERRRSRSRSRDRRTNRASRSRSRDRRKIDDQRGNLSGNSHKHKGEAKEQERKKERSRSIDKDRKKKDKEREREQDKRKEKQKREEKDFKFSSQDDRLKRKRESERTFSRSGSISVKIIRHDSRQDSKKSTTKDSKKHSGSDSSGRSSSESPGSSKEKKAKKPKHSRSRSAEKSQRSGKKASRKHKSKSRSR

SEQ ID NO: 4968 - protein, 2472 aa, Homo sapiens
MDPSGVKVLETAEDIQERRQQVLDRYHRFKELSTLRRQKLEDSYRFQFFQRDAEELEKWIQEKLQIASDENYKDPTNLQGKLQKHQAFEAEVQANSGAIVKLDETGNLMISEGHFASETIRTRLMELHRQWELLLEKMREKGIKLLQAQNLVQYLRECEDVMDWINDKEAIVTSEELGQDLEHVEVLQKKFEEFQTDMAAHEERVNEVNQFAAKLIQEQHPEEELIKTKQDEVNAAWQRLKGLALQRQGKLFGAAEVQRFNRDVDETISWIKEKEQLMASDDFGRDLASVQALLRKHEGLERDLAALEDKVKALCAEADRLQQSHPLSATQIQVKREELITNWEQIRTLAAERHARLNDSYRLQRFLADFRDLTSWVTEMKALINADELASDVAGAEALLDRHQEHKGEIDAHEDSFKSADESGQALLAAGHYASDEVREKLTVLSEERAALLELWELRRQQYEQCMDLQLFYRDTEQVDNWMSKQEAFLLNEDLGDFLDSVEALLKKHEDFEKSLSAQEEKITALDEFATKLIQNNHYAMEDVATRRDALLSRRNALHERAMRRRAQLADSFHLQQFFRDSDELKSWVNEKMKTATDEAYKDPSNLQGKVQKHQAFEAELSANQSRIDALEKAGQKLIDVNHYAKDEVAARMNEVISLWKKLLEATELKGIKLREANQQQQFNRNVEDIELWLYEVEGHLASDDYGKDLTNVQNLQKKHALLEADVAAHQDRIDGVTIQARQFQDAGHFDAENIKKKQEALVARYEALKEPMVARKQKLADSLRLQQLFRDVEDEETWIREKEPIAASTNRGKDLIGVQNLLKKHQALQAEIAGHEPRIKAVTQKGNAMVEEGHFAAEDVKAKLHELNQKWEALKAKASQRRQDLEDSLQAQQYFADANEAESWMREKEPIVGSTDYGKDEDSAEALLKKHEALMSDLSAYGSSIQALREQAQSCRQQVAPTDDETGKELVLALYDYQEKSPREVTMKKGDILTLLNSTNKDWWKVEVNDRQGFVPAAYVKKLDPAQSASRENLLEEQGSIALRQEQIDNQTRITKEAGSVSLRMKQVEELYHSLLELGEKRKGMLEKSCKKFMLFREANELQQWINEKEAALTSEEVGADLEQVEVLQKKFDDFQKDLKANESRLKDINKVAEDLESEGLMAEEVQAVQQQEVYGMMPRDETDSKTASPWKSARLMVHTVATFNSIKELNERWRSLQQLAEERSQLLGSAHEVQRFHRDADETKEWIEEKNQALNTDNYGHDLASVQALQRKHEGFERDLAALGDKVNSLGETAERLTQSHPESAEDLQEKCTELNQAWSSLGKRADQRKAKLGDSHDLQRFLSDFRDLMSWINGIRGLVSSDELAKDVTGAEALLERHQEHRTEIDARAGTFQAFEQFGQQLLAHGHYASPEIKQKLDILDQERADLEKAWVQRRMMLDQCLELQLFHRDCEQAENWMAAREAFLNTEDKGDSLDSVEALIKKHEDFDKAINVQEEKIAALQAFADQLIAAGHYAKGDISSRRNEVLDRWRRLKAQMIEKRSKLGESQTLQQFSRDVDEIEAWISEKLQTASDESYKDPTNIQSKHQKHQAFEAELHANADRIRGVIDMGNSLIERGACAGNEDAVKARLAALADQWQFLVQKSAEKSQKLKEANKQQNFNTGIKDIAFWLSEVEALLASEDYGKDLASVNNLLKKHQLLEADISAHEDRLKDLNSQADSLMTSSAFDTSQVKDKRDTINGRFQKIKSMAASRRAKLNESHRLHQFFRDMDDEESWIKEKKLLVGSEDYGRDLTGVQNLRKKHKRLEAELAAHEPAIQGVLDTGKKLSDDNTIGKEEIQQRLAQFVEHWKELKQLAAARGQRLEESLEYQQFVANVEEEEAWINEKMTLVASEDYGDTLAAIQGLLKKHEAFETAFTVHKDRVNDVCTNGQDLIKKNNHHEENISSKMKGLNGKVSDLEKAAAQRKANVDENSAFLQFNWKADVVESWIGEKENSLKTDDYGRDLSSVQTLLTKQETFDAGLQAFQQEGIANITALKDQLLAAKHVQSKAIEARHASLMKRWSQLLANSAARKKKLLEAQSHFRKVEDLFLTFAKKASAFNSWFENAEEDLTDPVRCNSLEEIKALREAHDAFRSSLSSAQADFNQLAELDRQIKSFRVASNPYTWFTMEALEETWRNLQKIIKERELELQKEQRRQEENDKLRQEFAQHANAFHQWIQETRTYLLDGSCMVEESGTLESQLEATKRKHQEIRAMRSQLKKIEDLGAAMEEALILDNKYTEHSTVGLAQQWDQLDQLGMRMQHNLEQQIQARNTTGVTEEALKEFSMMFKHFDKDKSGRLNHQDGKSCLRSLGYDLPMVEEGEPDPEFEAILDTVDPNRDGHVSLQEYMAFMISRETENVKSSEEIESAFRALSSEGKPYVTKEELYQNLTREQADYCVSHMKPIVDGKGRELPTAFDYVEFTRSLFVN

SEQ ID NO: 4969 - protein, 1589 aa, Homo sapiens
MAKQLNLPENTDDWTKEDVNQWLESHKIDQKHREILTEQDVNGAVLKWLKKEHLVDMGITHGPAIQIEELFKELRKTAIEDSIQTSKMGKPSKNAPKDQTVSQKERRETSKQKQKGKENPDMANPSAMSTTAKGSKSLKVELIEDKIDYTKERQPSIDLTCVSYPFDEFSNPYRYKLDFSLQPETGPGNLIDPIHEFKAFTNTATATEEDVKMKFSNEVFRFASACMNSRTNGTIHFGVKDKPHGKIVGIKVTNDTKEALINHFNLMINKYFEDHQVQQAKKCIREPRFVEVLLPNSTLSDRFVIEVDIIPQFSECQYDYFQIKMQNYNNKIWEQSKKFSLFVRDGTSSKDITKNKVDFRAFKADFKTLAESRKAAEEKFRAKTNKKEREGPKLVKLLTGNQDLLDNSYYEQYILVTNKCHPDQTKHLDFLKEIKWFAVLEFDPESNINGVVKAYKESRVANLHFPSVYVEQKTTPNETISTLNLYHQPSWIFCNGRLDLDSEKYKPFDPSSWQRERASDVRKLISFLTHEDIMPRGKFLVVFLLLSSVDDPRDPLIETFCAFYQDLKGMENILCICVHPHIFQGWKDLLEARLIKHQDEISSQCISALSLEEINGTILKLKSVTQSSKRLLPSIGLSTVLLKKEEDIMTALEIICENECEGTLLEKDKNKFLEFKASKEEDFYRGGKVSWWNFYFSSESYSSPFVKRDKYERLEAMIQNCADSSKPTSTKIIHLYHHPGCGGTTLAMHILWELRKKFRCAVLKNKTVDFSEIGEQVTSLITYGAMNRQEYVPVLLLVDDFEEQDNVYLLQYSIQTAIAKKYIRYEKPLVIILNCMRSQNPEKSARIPDSIAVIQQLSPKEQRAFELKLKEIKEQHKNFEDFYSFMIMKTNFNKEYIENVVRNILKGQNIFTKEAKLFSFLALLNSYVPDTTISLSQCEKFLGIGNKKAFWGTEKFEDKMGTYSTILIKTEVIECGNYCGVRIIHSLIAEFSLEELKKSYHLNKSQIMLDMLTENLFFDTGMGKSKFLQDMHTLLLTRHRDEHEGETGNWFSPFIEALHKDEGNEAVEAVLLESIHRFNPNAFICQALARHFYIKKKDFGNALNWAKQAKIIEPDNSYISDTLGQVYKSKIRWWIEENGGNGNISVDDLIALLDLAEHASSAFKESQQQSEDREYEVKERLYPKSKRRYDTYNIAGYQGEIEVGLYTIQILQLIPFFDNKNELSKRYMVNFVSGSSDIPGDPNNEYKLALKNYIPYLTKLKFSLKKSFDFFDEYFVLLKPRNNIKQNEEAKTRRKVAGYFKKYVDIFCLLEESQNNTGLGSKFSEPLQVERCRRNLVALKADKFSGLLEYLIKSQEDAISTMKCIVNEYTFLLEQCTVKIQSKEKLNFILANIILSCIQPTSRLVKPVEKLKDQLREVLQPIGLTYQFSEPYFLASLLFWPENQQLDQHSEQMKEYAQALKNSFKGQYKHMHRTKQPIAYFFLGKGKRLERLVHKGKIDQCFKKTPDINSLWQSGDVWKEEKVQELLLRLQGRAENNCLYIEYGINEKITIPITPAFLGQLRSGRSIEKVSFYLGFSIGGPLAYDIEIV

SEQ ID NO: 4970 - protein, 364 aa, Homo sapiens
MGILEKISEIEKEIARTQKNKATEYHLGLLKAKLAKYRAQLLEPSKSASSKGEGFDVMKSGDARVALIGFPSVGKSTFLSLMTSTASEAASYEFTTLTCIPGVIEYKGANIQLLDLPGIIEGAAQGKGRGRQVIAVARTADVIIMMLDATKGEVQRSLLEKELESVGIRLNKHKPNIYFKPKKGGGISFNSTVTLTQCSEKLVQLILHEYKIFNAEVLFREDCSPDEFIDVIVGNRVYMPCLYVYNKIDQISMEEVDRLARKPNSVVISCGMKLNLDYLLEMLWEYLALTCIYTKKRGQRPDFTDAIILRKGASVEHVCHRIHRSLASQFKYALVWGTSTKYSPQRVGLTHTMEHEDVIQIVKK

SEQ ID NO: 4971 - protein, 225 aa, Homo sapiens
MAAAGGGGGGAAAAGRAYSFKVVLLGEGCVGKTSLVLRYCENKFNDKHITTLQASFLTKKLNIGGKRVNLAIWDTAGQERFHALGPIYYRDSNGAILVYDITDEDSFQKVKNWVKELRKMLGNEICLCIVGNKIDLEKERHVSIQEAESYAESVGAKHYHTSAKQNKGIEELFLDLCKRMIETAQVDERAKGNGSSQPGTARRGVQIIDDEPQAQTSGGGCCSSG

SEQ ID NO: 4972 - protein, 92 aa, Homo sapiens
MKLCVTVLSLLMLVAAFCSPALSAPMGSDPPTACCFSYTARKLPRNFVVDYYETSSLCSQPAVVFQTKRSKQVCADPSESWVQEYVYDLELN

SEQ ID NO: 4973 - protein, 647 aa, Homo sapiens
MGPLSARLLMQRGRPKSDRLGKIRSLDLSGLELLSEHLDPKLLCRLTQLQELDLSNNHLETLPDNLGLSHLRVLRCANNQLGDVTALCQFPKLEELSLEGNPFLTVNDNLKVSFLLPTLRKVNGKDASSTYSQVENLNRELTSRVTAHWEKFMATLGPEEEAEKAQADFVKSAVRDVRYGPESLSEFTQWRVRMISEELVAASRTQVQKANSPEKPPEAGAAHKPRARLAALKRPDDVPLSLSPSKRACASPSAQVEGSPVAGSDGSQPAVKLEPLHFLQCHSKNNSPQDLETQLWACAFEPAWEEGATSQTVATCGGEAVCVIDCQTGIVLHKYKAPGEEFFSVAWTALMVVTQAGHKKRWSVLAAAGLRGLVRLLHVRAGFCCGVIRAHKKAIATLCFSPAHETHLFTASYDKRIILWDIGVPNQDYEFQASQLLTLDTTSIPLRLCPVASCPDARLLAGCEGGCCCWDVRLDQPQKRRVCEVEFVFSEGSEASGRRVDGLAFVNEDIVASKGSGLGTICLWSWRQTWGGRGSQSTVAVVVLARLQWSSTELAYFSLSACPDKGIVLCGDEEGNVWLYDVSNILKQPPLLPAALQAPTQILKWPQPWALGQVVTKTMVNTVVANASFTYLTALTDSNIVAIWGRM

SEQ ID NO: 4974 - protein, 354 aa, Homo sapiens
MGCTLSAEDKAAVERSKMIDRNLREDGEKAAKEVKLLLLGAGESGKSTIVKQMKIIHEDGYSEDECKQYKVVVYSNTIQSIIAIIRAMGRLKIDFGEAARADDARQLFVLAGSAEEGVMTPELAGVIKRLWRDGGVQACFSRSREYQLNDSASYYLNDLDRISQSNYIPTQQDVLRTRVKTTGIVETHFTFKDLYFKMFDVGGQRSERKKWIHCFEGVTAIIFCVALSDYDLVLAEDEEMNRMHESMKLFDSICNNKWFTETSIILFLNKKDLFEEKIKRSPLTICYPEYTGSNTYEEAAAYIQCQFEDLNRRKDTKEIYTHFTCATDTKNVQFVFDAVTDVIIKNNLKECGLY

SEQ ID NO: 4975 - protein, 1565 aa, Homo sapiens
MSFLEEARAAGRAVVLALVLLLLPAVPVGASVPPRPLLPLQPGMPHVCAEQELTLVGRRQPCVQALSHTVPVWKAGCGWQAWCVGHERRTVYYMGYRQVYTTEARTVLRCCRGWMQQPDEEGCLSAECSAGLCFHGGRCVPGSAQPCHCPPGFQGPRCQYDVDECRTHNGGCQHRCVNTPGSYLCECKPGFRLHTDSRTCLAINSCALGNGGCQHHCVQLTITRHRCQCRPGFQLQEDGRHCVRRSPCANRNGSCMHRCQVVRGLARCECHVGYQLAADGKACEDVDECAAGLAQCAHGCLNTQGSFKCVCHAGYELGADGRQCYRIEMEIVNSCEANNGGCSHGCSHTSAGPLCTCPRGYELDTDQRTCIDVDDCADSPCCQQVCTNNPGGYECGCYAGYRLSADGCGCEDVDECASSRGGCEHHCTNLAGSFQCSCEAGYRLHEDRRGCSPLEEPMVDLDGELPFVRPLPHIAVLQDELPQLFQDDDVGADEEEAELRGEHTLTEKFVCLDDSFGHDCSLTCDDCRNGGTCLLGLDGCDCPEGWTGLICNETCPPDTFGKNCSFSCSCQNGGTCDSVTGACRCPPGVSGTNCEDGCPKGYYGKHCRKKCNCANRGRCHRLYGACLCDPGLYGRFCHLTCPPWAFGPGCSEECQCVQPHTQSCDKRDGSCSCKAGFRGERCQAECELGYFGPGCWQACTCPVGVACDSVSGECGKRCPAGFQGEDCGQECPVGTFGVNCSSSCSCGGAPCHGVTGQCRCPPGRTGEDCEADCPEGRWGLGCQEICPACQHAARCDPETGACLCLPGFVGSRCQDVCPAGWYGPSCQTRCSCANDGHCHPATGHCSCAPGWTGFSCQRACDTGHWGPDCSHPCNCSAGHGSCDAISGLCLCEAGYVGPRCEQQCPQGHFGPGCEQLCQCQHGAACDHVSGACTCPAGWRGTFCEHACPAGFFGLDCRSACNCTAGAACDAVNGSCLCPAGRRGPRCAETCPAHTYGHNCSQACACFNGASCDPVHGQCHCAPGWMGPSCLQACPAGLYGDNCRHSCLCQNGGTCDPVSGHCACPEGWAGLACEKECLPRDVRAGCRHSGGCLNGGLCDPHTGRCLCPAGWTGDKCQSPCLRGWFGEACAQRCSCPPAAACHHVTGACRCPPGFTGSGCEQACPPGSFGEDCAQMCQCPGENPACHPATGTCSCAAGYHGPSCQQRCPPGRYGPGCEQLCGCLNGGSCDAATGACRCPTGFLGTDCNLTCPQGRFGPNCTHVCGCGQGAACDPVTGTCLCPPGRAGVRCERGCPQNRFGVGCEHTCSCRNGGLCHASNGSCSCGLGWTGRHCELACPPGRYGAACHLECSCHNNSTCEPATGTCRCGPGFYGQACEHPCPPGFHGAGCQGLCWCQHGAPCDPISGRCLCPAGFHGHFCERGCEPGSFGEGCHQRCDCDGGAPCDPVTGLCLCPPGRSGATCNLDCRRGQFGPSCTLHCDCGGGADCDPVSGQCHCVDGYMGPTCREGGPLRLPENPSLAQGLSGHTARLQQTHIPERWTSEALVEAVPWSPPLQSQPEGTLAFGDH

SEQ ID NO: 4976 - protein, 333 aa, Homo sapiens
MVSGSSGLAAARLLSRSFLLPQNGIRHCSYTASRQHLYVDKNTKIICQGFTGKQGTFHSQQALEYGTKLVGGTLPGKGGQTHLGLPVFNTVKEAKEQTGATASVIYVPPPFAAAAINEAIEAEIPLVVCITEGIPQQDMVRVKHKLLRQEKTRLIGPNCPGVINPGECKIGIMPGHIHKKGRIGIVSRSGTLTYEAVHQTTQVGLGQSLCVGIGGDPFNGTDFIDCLEIFLNDSATEGIILIGEIGGNAEENAAEFLKQHNSGPNSKPVVSFIAGLTAPPGRRMGHAGAIIAGGKGGAKEKISALQSAGVVVSMSPAQLGTTIYKEFEKRKML

SEQ ID NO: 4977 - protein, 155 aa, Homo sapiens
MPVSYSSVTTRYYHRAGAEEGKDRIIFVTKEDHETPSSAELVADDPNDPYEEHGLILPNGNINWNCPCLGGMASGPCGEQFKSAFSCFHYSTEEIKGSDCVDQFRAMQECMQKYPDLYPQEDEDEEEEREKKPAEQAEETAPIEATATKEEEGSS

SEQ ID NO: 4978 - protein, 205 aa, Homo sapiens
MSSMNPEYDYLFKLLLIGDSGVGKSCLLLRFADDTYTESYISTIGVDFKIRTIELDGKTIKLQIWDTAGQERFRTITSSYYRGAHGIIVVYDVTDQESFNNVKQWLQEIDRYASENVNKLLVGNKCDLTTKKVVDYTTAKEFADSLGIPFLETSAKNATNVEQSFMTMAAEIKKRMGPGATAGGAEKSNVKIQSTPVKQSGGGCC

SEQ ID NO: 4979 - protein, 378 aa, Homo sapiens
MQLRLFRRLLLAALLLVIVWTLFGPSGLGEELLSLSLASLLPAPASPGPPLALPRLLIPNQEACSGPGAPPFLLILVCTAPENLNQRNAIRASWGGLREARGLRVQTLFLLGEPNAQHPVWGSQGSDLASESAAQGDILQAAFQDSYRNLTLKTLSGLNWAEKHCPMARYVLKTDDDVYVNVPELVSELVLRGGRWGQWERSTEPQREAEQEGGQVLHSEEVPLLYLGRVHWRVNPSRTPGGRHRVSEEQWPHTWGPFPPYASGTGYVLSASAVQLILKVASRAPLLPLEDVFVGVSARRGGLAPTQCVKLAGATHYPLDRCCYGKFLLTSHRLDPWKMQEAWKLVGGSDGERTAPFCSWFQGVLGILRCRAIAWLQS

SEQ ID NO: 4980 - protein, 213 aa, Homo sapiens
MGRNKKKKRDGDDRRPRLVLSFDEEKRREYLTGFHKRKVERKKAAIEEIKQRLKEEQRKLREERHQEYLKMLAEREEALEEADELDRLVTAKTESVQYDHPNHTVTVTTISDLDLSGARLLGLTPPEGGAGDRSEEEASSTEKPTKALPRKSRDPLLSQRISSLTASLHAHSRKKVKRKHPRRAQDSKKPPRAPRTSKAQRRRLTGKARHSGE

SEQ ID NO: 4981 - protein, 365 aa, Homo sapiens
MGRWALDVAFLWKAVLTLGLVLLYYCFSIGITFYNKWLTKSFHFPLFMTMLHLAVIFLFSALSRALVQCSSHRARVVLSWADYLRRVAPTALATALDVGLSNWSFLYVTVSLYTMTKSSAVLFILIFSLIFKLEELRAALVLVVLLIAGGLFMFTYKSTQFNVEGFALVLGASFIGGIRWTLTQMLLQKAELGLQNPIDTMFHLQPLMFLGLFPLFAVFEGLHLSTSEKIFRFQDTGLLLRVLGSLFLGGILAFGLGFSEFLLVSRTSSLTLSIAGIFKEVCTLLLAAHLLGDQISLLNWLGFALCLSGISLHVALKALHSRGDGGPKALKGLGSSPDLELLLRSSQREEGDNEEEEYFVAQGQQ

SEQ ID NO: 4982 - protein, 344 aa, Homo sapiens
MGRWALDVAFLWKAVLTLGLVLLYYCFSIGITFYNKWLTKSFHFPLFMTMLHLAVIFLFSALSRALVQCSSHRARVVLSWADYLRRVAPTALATALDVGLSNWSFLYVTVSLYTMTKSSAVLFILIFSLIFKLEELSTQFNVEGFALVLGASFIGGIRWTLTQMLLQKAELGLQNPIDTMFHLQPLMFLGLFPLFAVFEGLHLSTSEKIFRFQDTGLLLRVLGSLFLGGILAFGLGFSEFLLVSRTSSLTLSIAGIFKEVCTLLLAAHLLGDQISLLNWLGFALCLSGISLHVALKALHSRGDGGPKALKGLGSSPDLELLLRSSQREEGDNEEEEYFVAQGQQ

SEQ ID NO: 4983 - protein, 365 aa, Homo sapiens; identical to SEQ ID NO: 4981

SEQ ID NO: 4984 - protein, 204 aa, Homo sapiens
MGAVTDDEVIRKRLLIDGDGAGGDRRINLLVKSFIKWCNSGSQEEGYSQYQRMLSTLSQCEFSMGKTLLVYDMNLREMENYEKIYKEIECSIAGAHEKIAECKKQILQAKRIRKNRQEYDALAKVIQHHPDRHETLKELEALGKELEHLSHIKESVEDKLELRRKQFHVLLSTIHELQQTLENDEKLSEVEEAQEASMESDPKP

SEQ ID NO: 4985 - protein, 260 aa, Homo sapiens
MASLEVSRSPRRSRRELEVRSPRQNKYSVLLPTYNERENLPLIVWLLVKSFSESGINYEIIIIDDGSPDGTRDVAEQLEKIYGSDRILLRPREKKLGLGTAYIHGMKHATGNYIIIMDADLSHHPKFIPEFIRKQKEGNFDIVSGTRYKGNGGVYGWDLKRKIISRGANFLTQILLRPGASDLTGSFRLYRKEVLEKLIEKCVSKGYVFQMEMIVRARQLNYTIGEVPISFVDRVYGESKLGGNEIVSFLKGLLTLFATT

SEQ ID NO: 4986 - protein, 365 aa, Homo sapiens
MSSSVEQKKGPTRQRKCGFCKSNRDKECGQLLISENQKVAAHHKCMLFSSALVSSHSDNESLGGFSIEDVQKEIKRGTKLMCSLCHCPGATIGCDVKTCHRTYHYHCALHDKAQIREKPSQGIYMVYCRKHKKTAHNSEADLEESFNEHELEPSSPKSKKKSRKGRPRKTNFKGLSEDTRSTSSHGTDEMESSSYRDRSPHRSSPSDTRPKCGFCHVGEEENEARGKLHIFNAKKAAAHYKCMLFSSGTVQLTTTSRAEFGDFDIKTVLQEIKRGKRMKCTLCSQPGATIGCEIKACVKTYHYHCGVQDKAKYIENMSRGIYKLYCKNHSGNDERDEEDEERESKSRGKVEIDQQQLTQQQLNGN

SEQ ID NO: 4987 - protein, 312 aa, Homo sapiens
MSSSVEQKKGPTRQRKCGFCKSNRDKECGQLLISENQKVAAHHKCMLFSSALVSSHSDNESLGGFSIEDVQKEIKRGTKLMCSLCHCPGATIGCDVKTCHRTYHYHCALHDKAQIREKPSQGIYMVYCRKHKKTAHNSEAADLEESFNEHELEPSSPKSKKKSRKGRPRKTNFKGLSEDTRSTSSHGTDEMESSSYRDRSPHRSSPSDTRPKCGFCHVGEEENEARGKLHIFNAKKAAAHYKCMLFSSGTVQLTTTSRAEFGDFDIKTVLQEIKRGKRMVCSFYICYATLHLICCFKFRVHPKFIQSSENLK

SEQ ID NO: 4988 - protein, 365 aa, Homo sapiens; identical to SEQ ID NO: 4986

SEQ ID NO: 4989 - protein, 185 aa, Homo sapiens
MRRMRRMWATQGLAVALALSVLPGSRALRPGDCEVCISYLGRFYQDLKDRDVTFSPATIENELIKFCREARGKENRLCYYIGATDDAATKIINEVSKPLAHHIPVEKICEKLKKKDSQICELKYDKQIDLSTVDLKKLRVKELKKILDDWGETCKGCAEKSDYIRKINELMPKYAPKAASARTDL

SEQ ID NO: 4990 - protein, 223 aa, Homo sapiens
MPKKFQGENTKSAAARARRAEAKAAADAKKQKELEDAYWKDDDKHVMRKEQRKEEKEKRRLDQLERKKETQRLLEEEDSKLKGGKAPRVATSSKVTRAQIEDTLRRDHQLREAPDTAEKAKSHLEVPLEENVNRRVLEEGSVEARTIEDAIAVLSVAEEAADRHPERRMRAAFTAFEEAQLPRLKQENPNMRLSQLKQLLKKEWLRSPDNPMNQRAVPFNAPK

SEQ ID NO: 4991 - protein, 196 aa, Homo sapiens
MGSVNSRGHKAEAQVVMMGLDSAGKTTLLYKLKGHQLVETLPTVGFNVEPLKAPGHVSLTLWDVGGQAPLRASWKDYLEGTDILVYVLDSTDEARLPESAAELTEVLNDPNMAGVPFLVLANKQEAPDALPLLKIRNRLSLERFQDHCWELRGCSALTGEGLPEALQSLWSLLKSRSCMCLQARAHGAERGDSKRS

SEQ ID NO: 4992 - protein, 526 aa, Homo sapiens
MVAKDYPFYLTVKRANCSLELPPASGPAKDAEEPSNKRVKPLSRVTSLANLIPPVKATPLKRFSQTLQRSISFRSESRPDILAPRPWSRNAAPSSTKRRDSKLWSETFDVCVNQMLTSKEIKRQEAIFELSQGEEDLIEDLKLAKKAYHDPMLKLSIMTEQELNQIFGTLDSLIPLHEELLSQLRDVRKPDGSTEHVGPILVGWLPCLSSYDSYCSNQVAAKALLDHKKQDHRVQDFLQRCLESPFSRKLDLWNFLDIPRSRLVKYPLLLREILRHTPNDNPDQQHLEEAINIIQGIVAEINTKTGESECRYYKERLLYLEEGQKDSLIDSSRVLCCHGELKNNRGVKLHVFLFQEVLVITRAVTHNEQLCYQLYRQPIPVKDLLLEDLQDGEVRLGGSLRGAFSNNERIKNFFRVSFKNGSQSQTHSLQANDTFNKQQWLNCIRQAKETVLCAAGQAGVLDSEGSFLNPTTGSRELQGETKLEQMDQSDSESDCSMDTSEVSLDCERMEQTDSSCGNSRHGESNV

SEQ ID NO: 4993 - protein, 841 aa, Homo sapiens
MAQALSEEEFQRMQAQLLELRTNNYQLSDELRKNGVELTSLRQKVAYLDKEFSKAQKALSKSKKAQEVEVLLSENEMLQAKLHSQEEDFRLQNSTLMAEFSKLCSQMEQLEQENQQLKEGAAGAGVAQAGPLVDGELLRLQAENTALQKNVAALQERYGKEAGKFSAVSEGQGDPPGGPAPTVLAPMPLAEVELKWEMEKEEKRLLWEQLQGLESSKQAETSRLQEELAKLSEKLKKKQESFCRLQTEKETLFNDSRNKIEELQQRKEADHKAQLARTQKLQQELEAANQSLAELRDQRQGERLEHAAALRALQDQVSIQSADAQEQVEGLLAENNALRTSLAALEQIQTAKTQELNMLREQTTGLAAELQQQQAEYEDLMGQKDDLNSQLQESLRANSRLLEQLQEIGQEKEQLTQELQEARKSAEKRKAMLDELAMETLQEKSQHKEELGAVRLRHEKEVLGVRARYERELRELHEDKKRQEEELRGQIREEKARTRELETLQQTVEELQAQVHSMDGAKGWFERRLKEAEESLQQQQQEQEEALKQCREQHAAELKGKEEELQDVRDQLEQAQEERDCHLKTISSLKQEVKDTVDGQRILEKKGSAALKDLKRQLHLERKRADKLQERLQDILTNSKSRSGLEELVLSEMNSPSRTQTGDSSSISSFSYREILREKESSAVPARSLSSSPQAQPPRPAELSDEEVAELFQRLAETQQEKWMLEEKVKHLEVSSASMAEDLCRKSAIIETYVMDSRIDVSVAAGHTDRSGLGSVLRDLVKPGDENLREMNKKLQNMLEEQLTKNMHLHKDMEVLSQEIVRLSKECVGPPDPDLEPGETS

SEQ ID NO: 4994 - protein, 625 aa, Homo sapiens
MAQALSEEEFQRMQAQLLELRTNNYQLSDELRKNGVELTSLRQKVAYLDKEFSKAQKALSKSKKAQEVEVLLSENEMLQAKLHSQEEDFRLQNSTLMAEFSKERYGKEAGKFSAVSEGQGDPPGGPAPTVLAPMPLAEVELKWEMEKEEKRLLWEQLQGLESSKQAETSRLQEELAKLSEKLKKKQESFCRLQTEKETLFNDSRNKIEELQQRKEADHKAQLARTQKLQQELEAANQSLAELRDQRQGERLEHAAALRALQDQVSIQSADAQEQVEGLLAENNALRTSLAALEQIQTAKTQELNMLREQTTGLAAELQQQQAEYEDLMGQKDDLNSQLQESLRANSRLLEQLQEIGQEKEQLTQELQEARKSAEKRKAMLDELAMETLQEKSQHKEELGAVRLRHEKEVLGVRARYERELRELHEDKKRQEEELRGQIREEKARTRELETLQQTVEELQAQVHSMDGAKGWFERRLKEAEGKEEELQDVRDQLEQAQEERDCHLKTISSLKQEVKDTVDGQRILEKKGSAALKDLKRQLHLERKRADKLQERLQDILTNSKSRSGLEELVLSEMNSPSRTQTGDSSSISSFSYREILREKESSAVPARVRGKEEPTAPASLNPKI

SEQ ID NO: 4995 - protein, 615 aa, Homo sapiens
MPSRKFADGEVVRGRWPGSSLYYEVEILSHDSTSQLYTVKYKDGTELELKENDIKPLTSFRQRKGGSTSSSPSRRRGSRSRSRSRSPGRPPKSARRSASASHQADIKEARREVEVKLTPLILKPFGNSISRYNGEPEHIERNDAPHKNTQEKFSLSQESSYIATQYSLRPRREEVKLKEIDSKEEKYVAKELAVRTFEVTPIRAKDLEFGGVPGVFLIMFGLPVFLFLLLLMCKQKDPSLLNFPPPLPALYELWETRVFGVYLLWFLIQVLFYLLPIGKVVEGTPLIDGRRLKYRLNGFYAFILTSAVIGTSLFQGVEFHYVYSHFLQFALAATVFCVVLSVYLYMRSLKAPRNDLSPASSGNAVYDFFIGRELNPRIGTFDLKYFCELRPGLIGWVVINLVMLLAEMKIQDRAVPSLAMILVNSFQLLYVVDALWNEEALLTTMDIIHDGFGFMLAFGDLVWVPFIYSFQAFYLVSHPNEVSWPMASLIIVLKLCGYVIFRGANSQKNAFRKNPSDPKLAHLKTIHTSTGKNLLVSGWWGFVRHPNYLGDLIMALAWSLPCGFNHILPYFYIIYFTMLLVHREARDEYHCKKKYGVAWEKYCQRVPYRIFPYIY

SEQ ID NO: 4996 - protein, 615 aa, Homo sapiens; identical to SEQ ID NO: 4995

SEQ ID NO: 4997 - protein, 431 aa, Homo sapiens
MAEITNIRPSFDVSPVVAGLIGASVLVVCVSVTVFVWSCCHQQAEKKHKNPPYKFIHMLKGISIYPETLSNKKKIIKVRRDKDGPGREGGRRNLLVDAAEAGLLSRDKDPRGPSSGSCIDQLPIKMDYGEELRSPITSLTPGESKTTSPSSPEEDVMLGSLTFSVDYNFPKKALVVTIQEAHGLPVMDDQTQGSDPYIKMTILPDKRHRVKTRVLRKTLDPVFDETFTFYVIPYSQLQDLVLHFLVLSFDRFSRDDVIGEVMVPLAGVDPSTGKVQLTRDIIKRNIQKCISRGELQVSLSYQPVAQRMTVVVLKARHLPKMDITGLSGNPYVKVNVYYGRKRIAKKKTHVKKCTLNPIFNESFIYDIPTDLLPDISIEFLVIDFDRTTKNEVVGRLILGAHSVTASGAEHWREVCESPRKPVAKWHSLSEY

SEQ ID NO: 4998 - protein, 488 aa, Homo sapiens
MSAFCLGLVGRASAPAEPDSACCMELPAAAGDAVRSPAAAAALIFPGGSGELELALEEELALLAAGERPSDPGEHPQAELLSVIRQKEKDLVLAARLGKALLERNQDMSRQYEQMHKELTDKLEHLEQEKHELRRRFENREGEWEGRVSELESDVKQLQDELERQQIHLREADREKSRAVQELSEQNQRLLDQLSRASEVERQLSMQVHALREDFREKNSSTNQHIIRLESLQAEIKMLSDRKRELEHRLSATLEENDLLQGTVEELQDRVLILERQGHDKDLQLHQSQLELQEVRLSCRQLQVKVEELTEERSLQSSAATSTSLLSEIEQSMEAEELEQEREQLRLQLWEAYCQVRYLCSHLRGNDSADSAVSTDSSMDESSETSSAKDVPAGSLRTALNELKRLIQSIVDGMEPTGSRRLDDDSLEEQIRQTSEDSRALRELMEGERGRLPEASRCCLPACSQPIQSPSLPHVGKAQQGCAARMYL

SEQ ID NO: 4999 - protein, 1081 aa, Homo sapiens
MPLEQESRMEVLSACAEALHAHGYSSEASRLTVELAQDLLANPPDLKVEPPPAKGKKNKVSTSRQTWVATNTLSKAAFLLTVLSERPEHHNLAFRVGMFALELQRPPASTKALEVKLAYQESEVAALLKKIPLGPSEMSTMRCRAEELREGTLCDYRPVLPLMLASFIFDVLCAPVVSPTGSRPPSRNWNSETPGDEELGFEAAVAALGMKTTVSEAEHPLLCEGTRREKGDLALALMITYKDDQAKLKKILDKLLDRESQTHKPQTLSSFYSSSRPTTASQRSPSKHGGPSAPGTLQPLTSGSAGPAQPGSVAGAGPGPTEGFTEKNVPESSPHSPCEGLPSEAALTPRPEGKVPSRLALGSRGGYNGRGWGSPGRPKMKHTGMASIDSSAPETTSDSSPTLSRRPLQGGWAPTSWGRGQDSDSISNSSSDSLGSSSSSGSRRASASGGARAKTVEVGRYKGRRPESHAPHVPNQPSEAAAHFYFELAKTVLIKTGGNSSTSIFTHPSSSGGHQGPHRNLHLCAFEIGLYALGLHNFVSPNWLSRTYSSHVSWITGQAMEIGSAALTILVECWDGHLTPPEVASLADRASRARDSNMVRAAAELALSCLPHAHALNPNEIQRALVQCKEQDNLMLEKACMAVEVAAKGGGVYPEVLFEVAHQWFWLYEQTAGGSSTAREGATSCSASGIRAGGEAGRGMPEGRGGPGTEPVTVAAAAVTAAATVVPVISVGSSLYPGPGLGHGHSPGLHPYTALQPHLPCSPQYLTHPAHPAHPMPHMPRPAVFPVPSSAYPQGVHPAFLGAQYPYSVTPPSLAATAVSFPVPSMAPITVHPYHTEPGLPLPTSVACELWGQGTVSSVHPASTFPAIQGASLPALTTQPSPLVSGGFPPPEEETHSQPVNPHSLHHLHAAYRVGMLALEMLGRRAHNDHPNNFSRSPPYTDDVKWLLGLAAKLGVNYVHQFCVGAAKGVLSPFVLQEIVMETLQRLSPAHAHNHLRAPAFHQLVQRCQQAYMQYIHHSLIHLTPADYDDFVNAIRSARSAFCLTPMGMMQFNDILQNLKRSKQTKELWQRVSLEMATFSP

SEQ ID NO: 5000 - protein, 86 aa, Homo sapiens
MIPAVVLLLLLLVEQAAALGEPQLCYILDAILFLYGIVLTLLYCRLKIQVRKAAITSYEKSDGVYTGLSTRNQETYETLKHEKPPQ

SEQ ID NO: 5001 - protein, 1217 aa, Homo sapiens
MAAGRAQVPSSEQAWLEDAQVFIQKTLCPAVKEPNVQLTPLVIDCVKTVWLSQGRNQGSTLPLSYSFVSVQDLKTHQRLPCCSHLSWSSSAYQAWAQEAGPNGNPLPREQLLLLGTLTDLSADLEQECRNGSLYVRDNTGVLSCELIDLDLSWLGHLFLFPRWSYLPPARWNSSGEGHLELWDAPVPVFPLTISPGPVTPIPVLYPESASCLLRLRNKLRGVQRNLAGSLVRLSALVKSKQKAYFILSLGRSHPAVTHVSIIVQVPAQLVWHRALRPGTAYVLTELRVSKIRGQRQHVWMTSQSSRLLLLKPECVQELELELEGPLLEADPKPLPMPSNSEDKKDPESLVRYSRLLSYSGAVTGVLNEPAGLYELDGQLGLCLAYQQFRGLRRVMRPGVCLQLQDVHLLQSVGGGTRRPVLAPCLRGAVLLQSFSRQKPGAHSSRQAYGASLYEQLVWERQLGLPLYLWATKALEELACKLCPHVLRHHQFLQHSSPGSPSLGLQLLAPTLDLLAPPGSPVRNAHNEILEEPHHCPLQKYTRLQTPSSFPTLATLKEEGQRKAWASFDPKALLPLPEASYLPSCQLNRRLAWSWLCLLPSAFCPAQVLLGVLVASSHKGCLQLRDQSGSLPCLLLAKHSQPLSDPRLIGCLVRAERFQLIVERDVRSIFPSWKELSMPGFIQKQQARVYVQFFLADALILPVPRPCLHSATPSTPQTDPTGPEGPHLGQSRLFLLCHKEALMKRNFCVPPGASPEVPKPALSFYVLGSWLGGTQRKEGTGWGLPEPQGNDDNDQKVHLIFFGSSVRWFEFLHPGQVYRLVAPGPATPMLFEKDGSSCISRRPLELAGCASCLTVQDNWTLELESSQDIQDVLDANKSLPESSLTDLLSDNFTDSLVSFSAEILSRTLCEPLVASLWMKLGNTGAMRRCVKLTVALETAECEFPPHLDVYIEDPHLPPSLGLLPGARVHFSQLEKRVSRSHNVYCCFRSSTYVQVLSFPPETTISVPLPHIYLAELLQGGQSPFQATASCHIVSVFSLQLFWVCAYCTSICRQGKCTRLGSTCPTQTAISQAIIRLLVEDGTAEAVVTCRNHHVAAALGLCPREWASLLDFVQVPGRVVLQFAGPGAQLESSARVDEPMTMFLWTLCTSPSVLRPIVLSFELERKPSKIVPLEPPRLQRFQCGELPFLTHVNPRLRLSCLSIRESEYSSSLGILASSC

SEQ ID NO: 5002 - protein, 838 aa, Homo sapiens
MSLQVLNDKNVSNEKNTENCDFLFSPPEVTGRSSVLRVSQKENVPPKNLAKAMKVTFQTPLRDPQTHRILSPSMASKLEAPFTQDDTLGLENSHPVWTQKENQQLIKEVDAKTTHGILQKPVEADTDLLGDASPAFGSGSSSESGPGALADLDCSSSSQSPGSSENQMVSPGKVSGSPEQAVEENLSSYSLDRRVTPASETLEDPCRTESQHKAETPHGAEEECKAETPHGAEEECRHGGVCAPAAVATSPPGAIPKEACGGAPLQGLPGEALGCPAGVGTPVPADGTQTLTCAHTSAPESTAPTNHLVAGRAMTLSPQEEVAAGQMASSSRSGPVKLEFDVSDGATSKRAPPPRRLGERSGLKPPLRKAAVRQQKAPQEVEEDDGRSGAGEDPPMPASRGSYHLDWDKMDDPNFIPFGGDTKSGCSEAQPPESPETRLGQPAAEQLHAGPATEEPGPCLSQQLHSASAEDTPVVQLAAETPTAESKERALNSASTSLPTSCPGSEPVPTHQQGQPALELKEESFRDPAEVLGTGAEVDYLEQFGTSSFKESALRKQSLYLKFDPLLRDSPGRPVPVATETSSMHGANETPSGRPREAKLVEFDFLGALDIPVPGPPPGVPAPGGPPLSTGPIVDLLQYSQKDLDAVVKATQEENRELRSRCEELHGKNLELGKIMDRFEEVVYQAMEEVQKQKELSKAEIQKVLKEKDQLTTDLNSMEKSFSDLFKRFEKQKEVIEGYRKNEESLKKCVEDYLARITQEGQRYQALKAHAEEKLQLANEEIAQVRSKAQAEALALQASLRKEQMRIQSLEKTVEQKTKENEELTRICDDLISKMEKI

SEQ ID NO: 5003 - protein, 926 aa, Homo sapiens
MPVRKQDTQRALHLLEEYRSKLSQTEDRQLRSSIERVINIFQSNLFQALIDIQEFYEVTLLDNPKCIDRSKPSEPIQPVNTWEISSLPSSTVTSETLPSSLSPSVEKYRYQDEDTPPQEHISPQITNEVIGPELVHVSEKNLSEIENVHGFVSHSHISPIKPTEAVLPSPPTVPVIPVLPVPAENTVILPTIPQANPPPVLVNTDSLETPTYVNGTDADYEYEEITLERGNSGLGFSIAGGTDNPHIGDDSSIFITKIITGGAAAQDGRLRVNDCILQVNEVDVRDVTHSKAVEALKEAGSIVRLYVKRRKPVSEKIMEIKLIKGPKGLGFSIAGGVGNQHIPGDNSIYVTKIIEGGAAHKDGKLQIGDKLLAVNNVCLEEVTHEEAVTALKNTSDFVYLKVAKPTSMYMNDGYAPPDITNSSSQPVDNHVSPSSFLGQTPASPARYSPVSKAVLGDDEITREPRKVVLHRGSTGLGFNIVGGEDGEGIFISFILAGGPADLSGELRKGDRIISVNSVDLRAASHEQAAAALKNAGQAVTIVAQYRPEEYSRFEAKIHDLREQMMNSSISSGSGSLRTSQKRSLYVRALFDYDKTKDSGLPSQGLNFKFGDILHVINASDDEWWQARQVTPDGESDEVGVIPSKRRVEKKERARLKTVKFNSKTRDKGQSFNDKRKKNLFSRKFPFYKNKDQSEQETSDADQHVTSNASDSESSYRGQEEYVLSYEPVNQQEVNYTRPVIILGPMKDRINDDLISEFPDKFGSCVPHTTRPKRDYEVDGRDYHFVTSREQMEKDIQEHKFIEAGQYNNHLYGTSVQSVREVAGKGKHCILDVSGNAIKRLQIAQLYPISIFIKPKSMENIMEMNKRLTEEQARKTFERAMKLEQEFTEHFTAIVQGDTLEDIYNQVKQIIEEQSGSYIWVPAKEKL

SEQ ID NO: 5004 - protein, 217 aa, Homo sapiens
MESVALYSFQATESDELAFNKGDTLKILNMEDDQNWYKAELRGVEGFIPKNYIRVKPHPWYSGRISRQLAEEILMKRNHLGAFLIRESESSPGEFSVSVNYGDQVQHFKVLREASGKYFLWEEKFNSLNELVDFYRTTTIAKKRQIFLRDEEPLLKSPGACFAQAQFDFSAQDPSQLSFRRGDIIEVLERPDPHWWRGRSCGRVGFFPRSYVQPVHL

SEQ ID NO: 5005 - protein, 618 aa, Homo sapiens
MGVGRQQRGPFQGVRVKNSVKELLLHIRSHKQKASGQAVDDFKTQGVNIEQFRELKNTVSYSGKRKGPDSLSDGPACKRPALLHSQFLTPPQTPTPGESMEDVHLNEPKQESSADLLQNIINIKNECSPVSLNTVQVSWLNPVVVPQSSPAEQCQDFHGGQVFSPPQKCQPFQVRGSQQMIDQASLYQYSPQNQHVEQQPHYTHKPTLEYSPFPIPPQSPAYEPNLFDGPESQFCPNQSLVSLLGDQRESENIANPMQTSSSVQQQNDAHLHSFSMMPSSACEAMVGHEMASDSSNTSLPFSNMGNPMNTTQLGKSLFQWQVEQEESKLANISQDQFLSKDADGDTFLHIAVAQGRRALSYVLARKMNALHMLDIKEHNGQSAFQVAVAANQHLIVQDLVNIGAQVNTTDCWGRTPLHVCAEKGHSQVLQAIQKGAVGSNQFVDLEATNYDGLTPLHCAVIAHNAVVHELQRNQQPHSPEVQELLLKNKSLVDTIKCLIQMGAAVEAKDRKSGRTALHLAAEEANLELIRLFLELPSCLSFVNAKAYNGNTALHVAASLQYRLTQLDAVRLLMRKGADPSTRNLENEQPVHLVPDGPVGEQIRRILKGKSIQQRAPPY

SEQ ID NO: 5006 - protein, 718 aa, Homo sapiens
MIVDKLLDDSRGGEGLRDAAGGCGLMTSPLNLSYFYGASPPAAAPGACDASCSVLGPSAPGSPGSDSSDFSSASSVSSCGAVESRSRGGARAERQPVEPHMGVGRQQRGPFQGVRVKNSVKELLLHIRSHKQKASGQAVDDFKTQGVNIEQFRELKNTVSYSGKRKGPDSLSDGPACKRPALLHSQFLTPPQTPTPGESMEDVHLNEPKQESSADLLQNIINIKNECSPVSLNTVQVSWLNPVVVPQSSPAEQCQDFHGGQVFSPPQKCQPFQVRGSQQMIDQASLYQYSPQNQHVEQQPHYTHKPTLEYSPFPIPPQSPAYEPNLFDGPESQFCPNQSLVSLLGDQRESENIANPMQTSSSVQQQNDAHLHSFSMMPSSACEAMVGHEMASDSSNTSLPFSNMGNPMNTTQLGKSLFQWQVEQEESKLANISQDQFLSKDADGDTFLHIAVAQGRRALSYVLARKMNALHMLDIKEHNGQSAFQVAVAANQHLIVQDLVNIGAQVNTTDCWGRTPLHVCAEKGHSQVLQAIQKGAVGSNQFVDLEATNYDGLTPLHCAVIAHNAVVHELQRNQQPHSPEVQELLLKNKSLVDTIKCLIQMGAAVEAKDRKSGRTALHLAAEEANLELIRLFLELPSCLSFVNAKAYNGNTALHVAASLQYRLTQLDAVRLLMRKGADPSTRNLENEQPVHLVPDGPVGEQIRRILKGKSIQQRAPPY

SEQ ID NO: 5007 - protein, 284 aa, Homo sapiens
MAEMDPVAEFPQPPGAARWAEVMARFAARLGAQGRRVVLVTSGGTKVPLEARPVRFLDNFSSGRRGATSAEAFLAAGYGVLFLYRARSAFPYAHRFPPQTWLSALRPSGPALSGLLSLEAEENALPGFAEALRSYQEAAAAGTFLAVEFTTLADYLHLLQAAAQALNPLGPSAMFYLAAAVSDFYVPVSEMPEHKIQSSGGPLQITMKMVPKLLSPLVKDWAPKAFIISFKLETDPAIVINRARKALEIYQHQVVVANILESRQSFVFIVTKDSETKLLLSRKK

SEQ ID NO: 5008 - protein, 481 aa, Homo sapiens
MKGYQSLVFNFFFLKLSAENESTPIQQLLEHFLRQLQRKDPHGFFAFPVTDAIAPGYSMIIKHPMDFGTMKDKIVANEYKSVTEFKADFKLMCDNAMTYNRPDTVYYKLAKKILHAGFKMMSKQAALLGNEDTAVEEPVPEVVPVQVETAKKSKKPSREVISCMFEPEGNACSLTDSTAEEHVLALVEHAADEARDRINRFLPGGKMGYLKRNGDGSLLYSVVNTAEPDADEEETHPVDLSSLSSKLLPGFTTLGFKDERRNKVTFLSSATTALSMQNNSVFGDLKSDEMELLYSAYGDETGVQCALSLQEFVKDAGSYSKKVVDDLLDQITGGDHSRTLFQLKQRRNVPMKPPDEAKVGDTLGDSSSSVLEFMSMKSYPDVSVDISMLSSLGKVKKELDPDDSHLNLDETTKLLQDLHEAQAERGGSRPSSNLSSLSNASERDQHHLGSPSRLSVGEQPDVTHDPYEFLQSPEPAASAKT

SEQ ID NO: 5009 - protein, 501 aa, Homo sapiens
MKGYQSLVFNFFFLKLSAENESTPIQQLLEHFLRQLQRKDPHGFFAFPVTDAIAPGYSMIIKHPMDFGTMKDKIVANEYKSVTEFKADFKLMCDNAMTYNRPDTVYYKLAKKILHAGFKMMSKERLLALKRSMSFMQDMDFSQQAALLGNEDTAVEEPVPEVVPVQVETAKKSKKPSREVISCMFEPEGNACSLTDSTAEEHVLALVEHAADEARDRINRFLPGGKMGYLKRNGDGSLLYSVVNTAEPDADEEETHPVDLSSLSSKLLPGFTTLGFKDERRNKVTFLSSATTALSMQNNSVFGDLKSDEMELLYSAYGDETGVQCALSLQEFVKDAGSYSKKVVDDLLDQITGGDHSRTLFQLKQRRNVPMKPPDEAKVGDTLGDSSSSVLEFMSMKSYPDVSVDISMLSSLGKVKKELDPDDSHLNLDETTKLLQDLHEAQAERGGSRPSSNLSSLSNASERDQHHLGSPSRLSVGEQPDVTHDPYEFLQSPEPAASAKT

SEQ ID NO: 5010 - protein, 376 aa, Homo sapiens
MAERGRKRPCGPGEHGQRIEWRKWKQQKKEEKKKWKDLKLMKKLERQRAQEEQAKRLEEEEAAAEKEDRGRPYTLSVALPGSILDNAQSPELRTYLAGQIARACAIFCVDEIVVFDEEGQDAKTVEGEFTGVGKKGQACVQLARILQYLECPQYLRKAFFPKHQDLQFAGLLNPLDSPHHMRQDEESEFREGIVVDRPTRPGHGSFVNCGMKKEVKIDKNLEPGLRVTVRLNQQQHPDCKTYHGKVVSSQDPRTKAGLYWGYTVRLASCLSAVFAEAPFQDGYDLTIGTSERGSDVASAQLPNFRHALVVFGGLQGLEAGADADPNLEVAEPSVLFDLYVNTCPGQGSRTIRTEEAILISLAALQPGLIQAGARHT

SEQ ID NO: 5011 - protein, 410 aa, Homo sapiens
MPGVCDRAPDFLSPSEDQVLRPALGSSVALNCTAWVVSGPHCSLPSVQWLKDGLPLGIGGHYSLHEYSWVKANLSEVLVSSVLGVNVTSTEVYGAFTCSIQNISFSSFTLQRAGPTSHVAAVLASLLVLLALLLAALLYVKCRLNVLLWYQDAYGEVEINDGKLYDAYVSYSDCPEDRKFVNFILKPQLERRRGYKLFLDDRDLLPRAEPSADLLVNLSRCRRLIVVLSDAFLSRAWCSHSFREGLCRLLELTRRPIFITFEGQRRDPAHPALRLLRQHRHLVTLLLWRPGSVTPSSDFWKEVQLALPRKVRYRPVEGDPQTQLQDDKDPMLILRGRVPEGRALDSEVDPDPEGDLGVRGPVFGEPSAPPHTSGVSLGESRSSEVDVSDLGSRNYSARTDFYCLVSKDDM

SEQ ID NO: 5012 - protein, 553 aa, Homo sapiens
MATDTSQGELVHPKALPLIVGAQLIHADKLGEKVEDSTMPIRRTVNSTRETPPKSKLAEGEEEKPEPDISSEESVSTVEEQENETPPATSSEAEQPKGEPENEEKEENKSSEETKKDEKDQSKEKEKKVKKTIPSWATLSASQLARAQKQTPMASSPRPKMDAILTEAIKACFQKSGASVVAIRKYIIHKYPSLELERRGYLLKQALKRELNRGVIKQVKGKGASGSFVVVQKSRKTPQKSRNRKNRSSAVDPEPQVKLEDVLPLAFTRLCEPKEASYSLIRKYVSQYYPKLRVDIRPQLLKNALQRAVERGQLEQITGKGASGTFQLKKSGEKPLLGGSLMEYAILSAIAAMNEPKTCSTTALKKYVLENHPGTNSNYQMHLLKKTLQKCEKNGWMEQISGKGFSGTFQLCFPYYPSPGVLFPKKEPDDSRDEDEDEDESSEEDSEDEEPPPKRRLQKKTPAKSPGKAASVKQRGSKPAPKVSAAQRGKARPLPKKAPPKAKTPAKKTRPSSTVIKKPSGGSSKKPATSARKEVKLPGKGKSTMKKSFRVKK

SEQ ID NO: 5013 - protein, 292 aa, Homo sapiens
MSHLSQQKIYSGENPFACKVCGKVFSHKSNLTEHEHFHTREKPFECNECGKAFSQKQYVIKHQNTHTGEKLFECNECGKSFSQKENLLTHQKIHTGEKPFECKDCGKAFIQKSNLIRHQRTHTGEKPFVCKECGKTFSGKSNLTEHEKIHIGEKPFKCSECGTAFGQKKYLIKHQNIHTGEKPYECNECGKAFSQRTSLIVHVRIHSGDKPYECNVCGKAFSQSSSLTVHVRSHTGEKPYGCNECGKAFSQFSTLALHLRIHTGKKPYQCSECGKAFSQKSHHIRHQKIHTH

SEQ ID NO: 5014 - protein, 704 aa, Homo sapiens
MANENHGSPREEASLLSHSPGTSNQSQPCSPKPIRLVQDLPEELVHAGWEKCWSRRENRPYYFNRFTNQSLWEMPVLGQHDVISDPLGLNATPLPQDSSLVETPPAENKPRKRQLSEEQPSGNGVKKPKIEIPVTPTGQSVPSSPSIPGTPTLKMWGTSPEDKQQAALLRPTEVYWDLDIQTNAVIKHRGPSEVLPPHPEVELLRSQLILKLRQHYRELCQQREGIEPPRESFNRWMLERKVVDKGSDPLLPSNCEPVVSPSMFREIMNDIPIRLSRIKFREEAKRLLFKYAEAARRLIESRSASPDSRKVVKWNVEDTFSWLRKDHSASKEDYMDRLEHLRRQCGPHVSAAAKDSVEGICSKIYHISLEYVKRIREKHLAILKENNISEEVEAPEVEPRLVYCYPVRLAVSAPPMPSVEMHMENNVVCIRYKGEMVKVSRNYFSKLWLLYRYSCIDDSAFERFLPRVWCLLRRYQMMFGVGLYEGTGLQGSLPVHVFEALHRLFGVSFECFASPLNCYFRQYCSAFPDTDGYFGSRGPCLDFAPLSGSFEANPPFCEELMDAMVSHFERLLESSPEPLSFIVFIPEWREPPTPALTRMEQSRFKRHQLILPAFEHEYRSGSQHICKKEEMHYKAVHNTAVLFLQNDPGFAKWAPTPERLQELSAAYRQSGRSHSSGSSSSSSSEAKDRDSGREQGPSREPHPT

SEQ ID NO: 5015 - protein, 122 aa, Homo sapiens
MAPQKDRKPKRSTWRFNLDLTHPVEDGIFDSGNFEQFLREKVKVNGKTGNLGNVVHIERFKNKITVVSEKQFSKRYLKYLTKKYLKKNNLRDWLRVVASDKETYELRYFQISQDEDESESED

SEQ ID NO: 5016 - protein, 416 aa, Homo sapiens
MASSSGSSPRPAPDENEFPFGCPPTVCQDPKEPRALCCAGCLSENPRNGEDQICPKCRGEDLQSISPGSRLRTQEKAHPEVAEAGIGCPFAGVGCSFKGSPQSVQEHEVTSQTSHLNLLLGFMKQWKARLGCGLESGPMALEQNLSDLQLQAAVEVAGDLEVDCYRAPCSESQEELALQHFMKEKLLAELEGKLRVFENIVAVLNKEVEASHLALATSIHQSQLDRERILSLEQRVVELQQTLAQKDQALGKLEQSLRLMEEASFDGTFLWKITNVTRRCHESACGRTVSLFSPAFYTAKYGYKLCLRLYLNGDGTGKRTHLSLFIVIMRGEYDALLPWPFRNKVTFMLLDQNNREHAIDAFRPDLSSASFQRPQSETNVASGCPLFFPLSKLQSPKHAYVKDDTMFLKCIVETST

SEQ ID NO: 5017 - protein, 1219 aa, Homo sapiens
MMSLSVRPQRRLLSARVNRSQSFAGVLGSHERGPRSFPVFSPPGPPRKPPALSRVSRMFSVAHPAAKVPQPERLDLVYTALKRGLTAYLEVHQQEQEKLQGQIRESKRNSRLGFLYDLDKQVKSIERFLRRLEFHASKIDELYEAYCVQRRLRDGAYNMVRAYTTGSPGSREARDSLAEATRGHREYTESMCLLESELEAQLGEFHLRMKGLAGFARLCVGDQYEICMKYGRQRWKLRGRIEGSGKQVWDSEETIFLPLLTEFLSIKVTELKGLANHVVVGSVSCETKDLFAALPQVVAVDINDLGTIKLSLEVTWSPFDKDDQPSAASSVNKASTVTKRFSTYSQSPPDTPSLREQAFYNMLRRQEELENGTAWSLSSESSDDSSSPQLSGTARHSPAPRPLVQQPEPLPIQVAFRRPETPSSGPLDEEGAVAPVLANGHAPYSRTLSHISEASVDAALAEASVEAVGPESLAWGPSPPTHPAPTHGEHPSPVPPALDPGHSATSSTLGTTGSVPTSTDPAPSAHLDSVHKSTDSGPSELPGPTHTTTGSTYSAITTTHSAPSPLTHTTTGSTHKPIISTLTTTGPTLNIIGPVQTTTSPTHTMPSPTHTTASPTHTSTSPTHTPTSPTHKTSMSPPTTTSPTPSGMGLVQTATSPTHPTTSPTHPTTSPILINVSPSTSLELATLSSPSKHSDPTLPGTDSLPCSPPVSNSYTQADPMAPRTPHPSPAHSSRKPLTSPAPDPSESTVQSLSPTPSPPTPAPQHSDLCLAMAVQTPVPTAAGGSGDRSLEEALGALMAALDDYRGQFPELQGLEQEVTRLESLLMQRQGLTRSRASSLSITVEHALESFSFLNEDEDEDNDVPGDRPPSSPEAGAEDSIDSPSARPLSTGCPALDAALVRHLYHCSRLLLKLGTFGPLRCQEAWALERLLREARVLEAVCEFSRRWEIPASSAQEVVQFSASRPGFLTFWDQCTERLSCFLCPVERVLLTFCNQYGARLSLRQPGLAEAVCVKFLEDALGQKLPRRPQPGPGEQLTVFQFWSFVETLDSPTMEAYVTETAEEVLLVRNLNSDDQAVVLKALRLAPEGRLRRDGLRALSSLLVHGNNKVMAAVSTQLRSLSLGPTFRERALLCFLDQLEDEDVQTRVAGCLALGCIKAPEGIEPLVYLCQTDTEAVREAARQSLQQCGEEGQSAHRRLEESLDALPRIFGPGSMASTAF

SEQ ID NO: 5018 - protein, 394 aa, Homo sapiens
MFSVFEEITRIVVKEMDAGGDMIAVRSLVDADRFRCFHLVGEKRTFFGCRHYTTGLTLMDILDTHGDKWLDELDSGLQGQKAEFQILDNVDSTGELIVRLPKEITISGSFQGFHHQKIKISENRISQQYLATLENRKLKRELPFSFRSINTRENLYLVTETLETVKEETLKSDRQYKFWSQISQGHLSYKHKGQREVTIPPNRVLSYRVKQLVFPNKETMRKSLGSEDSRNMKEKLEDMESVLKDLTEEKRKDVLNSLAKCLGKEDIRQDLEQRVSEVLISGELHMEDPDKPLLSSLFNAAGVLVEARAKAILDFLDALLELSEEQQFVAEALEKGTLPLLKDQVKSVMEQNWDELASSPPDMDYDPEARILCALYVVVSILLELAEGPTSVSS

SEQ ID NO: 5019 - protein, 167 aa, Homo sapiens
MADEATRRVVSEIPVLKTNAGPRDRELWVQRLKEEYQSLIRYVENNKNADNDWFRLESNKEGTRWFGKCWYIHDLLKYEFDIEFDIPITYPTTAPEIAVPELDGKTAKMYRGGKICLTDHFKPLWARNVPKFGLAHLMALGLGPWLAVEIPDLIQKGVIHHKEKCNQ

SEQ ID NO: 5020 - protein, 893 aa, Homo sapiens
MVPWVRTMGQKLKQRLRLDVGREICRQYPLFCFLLLCLSAASLLLNRYIHILMIFWSFVAGVVTFYCSLGPDSLLPNIFFTIKYKPKQLGLQELFPQGHSCAVCGKVKCKRHRPSLLLENYQPWLDLKISSKVDASLSEVDIPSIITKKLLKAAMKHIEVIVKARQKVKNTEFLQQAALEEYGPELHVALRSRRDELHYLRKLTELLFPYILPPKATDCRSLTLLIREILSGSVFLPSLDFLADPDTVNHLLIIFIDDSPPEKATEPASPLVPFLQKFAEPRNKKPSVLKLELKQIREQQDLLFRFMNFLKQEGAVHVLQFCLTVEEFNDRILRPELSNDEMLSLHEELQKIYKTYCLDESIDKIRFDPFIVEEIQRIAEGPYIDVVKLQTMRCLFEAYEHVLSLLENVFTPMFCHSDEYFRQLLRGAESPTRNSKLNRNTQKRGESFGISRIGSKIKGVFKSTTMEGAMLPNYGVAEGEDDFIEEGIVVMEDDSPVEAVSTPNTPRNLAAWKISIPYVDFFEDPSSERKEKKERIPVFCIDVERNDRRAVGHEPEHWSVYRRYLEFYVLESKLTEFHGAFPDAQLPSKRIIGPKNYEFLKSKREEFQEYLQKLLQHPELSNSQLLADFLSPNGGETQFLDKILPDVNLGKIIKSVPGKLMKEKGQHLEPFIMNFINSCESPKPKPSRPELTILSPTSENNKKLFNDLFKNNANRAENTERKQNQNYFMEVMTVEGVYDYLMYVGRVVFQVPDWLHHLLMGTRILFKNTLEMYTDYYLQCKLEQLFQEHRLVSLITLLRDAIFCENTEPRSLQDKQKGAKQTFEEMMNYIPDLLVKCIGEETKYESIRLLFDGLQQPVLNKQLTYVLLDIVIQELFPELNKVQKEVTSVTSWM

SEQ ID NO: 5021 - protein, 946 aa, Homo sapiens
MVPWVRTMGQKLKQRLRLDVGREICRQYPLFCFLLLCLSAASLLLNRYIHILMIFWSFVAGVVTFYCSLGPDSLLPNIFFTIKYKPKQLGLQELFPQGHSCAVCGKVKCKRHRPSLLLENYQPWLDLKISSKVDASLSEVLELVLENFVYPWYRDVTDDESFVDELRITLRFFASVLIRRIHKVDIPSIITKKLLKAAMKHIEVIVKARQKVKNTEFLQQAALEEYGPELHVALRSRRDELHYLRKLTELLFPYILPPKATDCRSLTLLIREILSGSVFLPSLDFLADPDTVNHLLIIFIDDSPPEKATEPASPLVPFLQKFAEPRNKKPSVLKLELKQIREQQDLLFRFMNFLKQEGAVHVLQFCLTVEEFNDRILRPELSNDEMLSLHEELQKIYKTYCLDESIDKIRFDPFIVEEIQRIAEGPYIDVVKLQTMRCLFEAYEHVLSLLENVFTPMFCHSDEYFRQLLRGAESPTRNSKLNRGSLSLDDFRNTQKRGESFGISRIGSKIKGVFKSTTMEGAMLPNYGVAEGEDDFIEEGIVVMEDDSPVEAVSTPNTPRNLAAWKISIPYVDFFEDPSSERKEKKERIPVFCIDVERNDRRAVGHEPEHWSVYRRYLEFYVLESKLTEFHGAFPDAQLPSKRIIGPKNYEFLKSKREEFQEYLQKLLQHPELSNSQLLADFLSPNGGETQFLDKILPDVNLGKIIKSVPGKLMKEKGQHLEPFIMNFINSCESPKPKPSRPELTILSPTSENNKKLFNDLFKNNANRAENTERKQNQNYFMEVMTVEGVYDYLMYVGRVVFQVPDWLHHLLMGTRILFKNTLEMYTDYYLQCKLEQLFQEHRLVSLITLLRDAIFCENTEPRSLQDKQKGAKQTFEEMMNYIPDLLVKCIGEETKYESIRLLFDGLQQPVLNKQLTYVLLDIVIQELFPELNKVQKEVTSVTSWM

SEQ ID NO: 5022 - protein, 493 aa, Homo sapiens
MADSEALPSLAGDPVAVEALLRAVFGVVVDEAIQKGTSVSQKVCEWKEPEELKQLLDLELRSQGESQKQILERCRAVIRYSVKTGHPRFFNQLFSGLDPHALAGRIITESLNTSQYTYEIAPVFVLMEEEVLRKLRALVGWSSGDGIFCPGGSISNMYAVNLARYQRYPDCKQRGLRTLPPLALFTSKECHYSIQKGAAFLGLGTDSVRVVKADERGKMVPEDLERQIGMAEAEGAVPFLVSATSGTTVLGAFDPLEAIADVCQRHGLWLHVDAAWGGSVLLSQTHRHLLDGIQRADSVAWNPHKLLAAGLQCSALLLQDTSNLLKRCHGSQASYLFQQDKFYDVALDTGDKVVQCGRRVDCLKLWLMWKAQGDQGLERRIDQAFVLARYLVEEMKKREGFELVMEPEFVNVCFWFVPPSLRGKQESPDYHERLSKVAPVLKERMVKEGSMMIGYQPHGTRGNFFRVVVANSALTCADMDFLLNELERLGQDL

SEQ ID NO: 5023 - protein, 521 aa, Homo sapiens
MSEPKAIDPKLSTTDRVVKAVPFPPSHRLTAKEVFDNDGKPRVDILKAHLMKEGRLEESVALRIITEGASILRQEKNLLDIDAPVTVCGDIHGQFFDLMKLFEVGGSPANTRYLFLGDYVDRGYFSIECVLYLWALKILYPKTLFLLRGNHECRHLTEYFTFKQECKIKYSERVYDACMDAFDCLPLAALMNQQFLCVHGGLSPEINTLDDIRKLDRFKEPPAYGPMCDILWSDPLEDFGNEKTQEHFTHNTVRGCSYFYSYPAVCEFLQHNNLLSILRAHEAQDAGYRMYRKSQTTGFPSLITIFSAPNYLDVYNNKAAVLKYENNVMNIRQFNCSPHPYWLPNFMDVFTWSLPFVGEKVTEMLVNVLNICSDDELGSEEDGFDGATAAARKEVIRNKIRAIGKMARVFSVLREESESVLTLKGLTPTGMLPSGVLSGGKQTLQSATVEAIEADEAIKGFSPQHKITSFEEAKGLDRINERMPPRRDAMPSDANLNSINKALTSETNGTDSNGSNSSNIQ

SEQ ID NO: 5024 - protein, 259 aa, Homo sapiens
MLLRSWFGNKDFQALPILARLPSMPTDMEHTGHYLHLAFLMTTVFSLSPGTKANYTRLWANSTSSWDSVIQNKTGRNQNENINTNPITPEVDYKGNSTNMPETSHIVALTSKSEQELYIPSVVSNSPSTVQSIENTSKSHGEIFKKDVCAENNNNMAMLICLIIIAVLFLICTFLFLSTVVLANKVSSLRRSKQVGKRQPRSNGDFLASGLWPAESDTWKRTKQLTGPNLVMQSTGVLTATRERKDEEGTEKLTNKQIG

SEQ ID NO: 5025 - protein, 236 aa, Homo sapiens
MPTDMEHTGHYLHLAFLMTTVFSLSPGTKANYTRLWANSTSSWDSVIQNKTGRNQNENINTNPITPEVDYKGNSTNMPETSHIVALTSKSEQELYIPSVVSNSPSTVQSIENTSKSHGEIFKKDVCAENNNNMAMLICLIIIAVLFLICTFLFLSTVVLANKVSSLRRSKQVGKRQPRSNGDFLASGLWPAESDTWKRTKQLTGPNLVMQSTGVLTATRERKDEEGTEKLTNKQIG

SEQ ID NO: 5026 - protein, 71 aa, Homo sapiens
MASNNTASIAQARKLVEQLKMEANIDRIKVSKAAADLMAYCEAHAKEDPLLTPVPASENPFREKKFFCAIL

SEQ ID NO: 5027 - protein, 917 aa, Homo sapiens
MIASHLLAYFFTELNHDQVQKVDQYLYHMRLSDETLLEISKRFRKEMEKGLGATTHPTAAVKMLPTFVRSTPDGTEHGEFLALDLGGTNFRVLWVKVTDNGLQKVEMENQIYAIPEDIMRGSGTQLFDHIAECLANFMDKLQIKDKKLPLGFTFSFPCHQTKLDESFLVSWTKGFKSSGVEGRDVVALIRKAIQRRGDFDIDIVAVVNDTVGTMMTCGYDDHNCEIGLIVGTGSNACYMEEMRHIDMVEGDEGRMCINMEWGAFGDDGSLNDIRTEFDQEIDMGSLNPGKQLFEKMISGMYMGELVRLILVKMAKEELLFGGKLSPELLNTGRFETKDISDIEGEKDGIRKAREVLMRLGLDPTQEDCVATHRICQIVSTRSASLCAATLAAVLQRIKENKGEERLRSTIGVDGSVYKKHPHFAKRLHKTVRRLVPGCDVRFLRSEDGSGKGAAMVTAVAYRLADQHRARQKTLEHLQLSHDQLLEVKRRMKVEMERGLSKETHASAPVKMLPTYVCATPDGTEKGDFLALDLGGTNFRVLLVRVRNGKWGGVEMHNKIYAIPQEVMHGTGDELFDHIVQCIADFLEYMGMKGVSLPLGFTFSFPCQQNSLDESILLKWTKGFKASGCEGEDVVTLLKEAIHRREEFDLDVVAVVNDTVGTMMTCGFEDPHCEVGLIVGTGSNACYMEEMRNVELVEGEEGRMCVNMEWGAFGDNGCLDDFRTEFDVAVDELSLNPGKQRFEKMISGMYLGEIVRNILIDFTKRGLLFRGRISERLKTRGIFETKFLSQIESDCLALLQVRAILQHLGLESTCDDSIIVKEVCTVVARRAAQLCGAGMAAVVDRIRENRGLDALKVTVGVDGTLYKLHPHFAKVMHETVKDLAPKCDVSFLQSEDGSGKGAALITAVACRIREAGQR

SEQ ID NO: 5028 - protein, 213 aa, Homo sapiens
MASLFKKKTVDDVIKEQNRELRGTQRAIIRDRAALEKQEKQLELEIKKMAKIGNKEACKVLAKQLVHLRKQKTRTFAVSSKVTSMSTQTKVMNSQMKMAGAMSTTAKTMQAVNKKMDPQKTLQTMQNFQKENMKMEMTEEMINDTLDDIFDGSDDEEESQDIVNQVLDEIGIEISGKMAKAPSAARSLPSASTSKATISDEEIERQLKALGVD

SEQ ID NO: 5029 - protein, 527 aa, Homo sapiens
MMHFKSGLELTELQNMTVPEDDNISNDSNDFTEVENGQINSKFISDRESRRSLTNSHLEKKKCDEYIPGTTSLGMSVFNLSNAIMGSGILGLAFALANTGILLFLVLLTSVTLLSIYSINLLLICSKETGCMVYEKLGEQVFGTTGKFVIFGATSLQNTGAMLSYLFIVKNELPSAIKFLMGKEETFSAWYVDGRVLVVIVTFGIILPLCLLKNLGYLGYTSGFSLSCMVFFLIVVIYKKFQIPCIVPELNSTISANSTNADTCTPKYVTFNSKTVYALPTIAFAFVCHPSVLPIYSELKDRSQKKMQMVSNISFFAMFVMYFLTAIFGYLTFYDNVQSDLLHKYQSKDDILILTVRLAVIVAVILTVPVLFFTDRSSLFELAKKTKFNLCRHTVVTCILLVVINLLVIFIPSMKDIFGVVGVTSANMLIFILPSSLYLKITTRMEIKELKEFGLPFSWAWGCCSPWSAFPWSSMTGPAHRVMVKATETRREKETSLLSAQSSPHTSAISHHFFCKFTEANRNVQDT

SEQ ID NO: 5030 - protein, 213 aa, Homo sapiens
MAQETNQTPGPMLCSTGCGFYGNPRTNGMCSVCYKEHLQRQQNSGRMSPMGTASGSNSPTSDSASVQRADTSLNNCEGAAGSTSEKSRNVPVAALPVTQQMTEMSISREDKITTPKTEVSEPVVTQPSPSVSQPSTSQSEEKAPELPKPKKNRCFMCRKKVGLTGFDCRCGNLFCGLHRYSDKHNCPYDYKAEAAAKIRKENPVVVAEKIQRI

SEQ ID NO: 5031 - protein, 962 aa, Homo sapiens
MNFLRGVMGGQSAGPQHTEAETIQKLCDRVASSTLLDDRRNAVRALKSLSKKYRLEVGIQAMEHLIHVLQTDRSDSEIIGYALDILYNIISNEEEEEVEENSTRQSEDLGSQFTEIFIKQQENVTLLLSLLEEFDFHVRWPGVKLLTSLLKQLGPQVQQIILVSPMGVSRLMDLLADSREVIRNDGVLLLQALTRSNGAIQKIVAFENAFERLLDIISEEGNSDGGIVVEDCLILLQNLLKNNNSNQNFFKEGSYIQRMKPWFEVGDENSGWSAQKVTNLHLMLQLVRVLVSPTNPPGATSSCQKAMFQCGLLQQLCTILMATGVPADILTETINTVSEVIRGCQVNQDYFASVNAPSNPPRPAIVVLLMSMVNERQPFVLRCAVLYCFQCFLYKNQKGQGEIVSTLLPSTIDATGNSVSAGQLLCGGLFSTDSLSNWCAAVALAHALQENATQKEQLLRVQLATSIGNPPVSLLQQCTNILSQGSKIQTRVGLLMLLCTWLSNCPIAVTHFLHNSANVPFLTGQIAENLGEEEQLVQGLCALLLGISIYFNDNSLESYMKEKLKQLIEKRIGKENFIEKLGFISKHELYSRASQKPQPNFPSPEYMIFDHEFTKLVKELEGVITKAIYKSSEEDKKEEEVKKTLEQHDNIVTHYKNMIREQDLQLEELRQQVSTLKCQNEQLQTAVTQQVSQIQQHKDQYNLLKIQLGKDNQHQGSYSEGAQMNGIQPEEIGRLREEIEELKRNQELLQSQLTEKDSMIENMKSSQTSGTNEQSSAIVSARDSEQVAELKQELATLKSQLNSQSVEITKLQTEKQELLQKTEAFAKSVEVQGETETIIATKTTDVEGRLSALLQETKELKNEIKALSEERTAIKEQLDSSNSTIAILQTEKDKLELEITDSKKEQDDLLVLLADQDQKILSLKNKLKDLGHPVEEEDELESGDQEDEDDESEDPGKDLDHI

SEQ ID NO: 5032 - protein, 100 aa, Homo sapiens
MRALTLLALLALAALCIAGQAGAKPSGAESSKGAAFVSKQEGSEVVKRPRRYLYQWLGAPVPYPDPLEPRREVCELNPDCDELADHIGFQEAYRRFYGPV

SEQ ID NO: 5033 - protein, 1661 aa, Homo sapiens
MLGAPDESSVRVAVRIRPQLAKEKIEGCHICTSVTPGEPQVFLGKDKAFTFDYVFDIDSQQEQIYIQCIEKLIEGCFEGYNATVFAYGQTGAGKTYTMGTGFDVNIVEEELGIISRAVKHLFKSIEEKKHIAIKNGLPAPDFKVNAQFLELYNEEVLDLFDTTRDIDAKSKKSNIRIHEDSTGGIYTVGVTTRTVNTESEMMQCLKLGALSRTTASTQMNVQSSRSHAIFTIHVCQTRVCPQIDADNATDNKIISESAQMNEFETLTAKFHFVDLAGSERLKRTGATGERAKEGISINCGLLALGNVISALGDKSKRATHVPYRDSKLTRLLQDSLGGNSQTIMIACVSPSDRDFMETLNTLKYANRARNIKNKVMVNQDRASQQINALRSEITRLQMELMEYKTGKRIIDEEGVESINDMFHENAMLQTENNNLRVRIKAMQETVDALRSRITQLVSDQANHVLARAGEGNEEISNMIHSYIKEIEDLRAKLLESEAVNENLRKNLTRATARAPYFSGSSTFSPTILSSDKETIEIIDLAKKDLEKLKRKEKRKKKSVAGKEDNTDTDQEKKEEKGVSERENNELEVEESQEVSDHEDEEEEEEEEEDDIDGGESSDESDSESDEKANYQADLANITCEIAIKQKLIDELENSQKRLQTLKKQYEEKLMMLQHKIRDTQLERDQVLQNLGSVESYSEEKAKKVRSEYEKKLQAMNKELQRLQAAQKEHARLLKNQSQYEKQLKKLQQDVMEMKKTKVRLMKQMKEEQEKARLTESRRNREIAQLKKDQRKRDHQLRLLEAQKRNQEVVLRRKTEEVTALRRQVRPMSDKVAGKVTRKLSSSDAPAQDTGSSAAAVETDASRTGAQQKMRIPVARVQALPTPATNGNRKKYQRKGLTGRVFISKTARMKWQLLERRVTDIIMQKMTISNMEADMNRLLKQREELTKRREKLSKRREKIVKENGEGDKNVANINEEMESLTANIDYINDSISDCQANIMQMEEAKEEGETLDVTAVINACTLTEARYLLDHFLSMGINKGLQAAQKEAQIKVLEGRLKQTEITSATQNQLLFHMLKEKAELNPELDALLGHALQDLDSVPLENVEDSTDEDAPLNSPGSEGSTLSSDLMKLCGEVKPKNKARRRTTTQMELLYADSSELASDTSTGDASLPGPLTPVAEGQEIGMNTETSGTSAREKELSPPPGLPSKIGSISRQSSLSEKKIPEPSPVTRRKAYEKAEKSKAKEQKHSDSGTSEASLSPPSSPPSRPRNELNVFNRLTVSQGNTSVQQDKSDESDSSLSEVHRSSRRGIINPFPASKGIRAFPLQCIHIAEGHTKAVLCVDSTDDLLFTGSKDRTCKVWNLVTGQEIMSLGGHPNNVVSVKYCNYTSLVFTVSTSYIKVWDIRDSAKCIRTLTSSGQVTLGDACSASTSRTVAIPSGENQINQIALNPTGTFLYAASGNAVRMWDLKRFQSTGKLTGHLGPVMCLTVDQISSGQDLIITGSKDHYIKMFDVTEGALGTVSPTHNFEPPHYDGIEALTIQGDNLFSGSRDNGIKKWDLTQKDLLQQVPNAHKDWVCALGVVPDHPVLLSGCRGGILKVWNMDTFMPVGEMKGHDSPINAICVNSTHIFTAADDRTVRIWKARNLQDGQISDTGDLGEDIASN

SEQ ID NO: 5034 - protein, 792 aa, Homo sapiens
MAAPSLLNWRRVSSFTGPVPRARHGHRAVAIRELMIIFGGGNEGIADELHVYNTATNQWFLPAVRGDIPPGCAAHGFVCDGTRILVFGGMVEYGRYSNELYELQASRWLWKKVKPHPPPSGLPPCPRLGHSFSLYGNKCYLFGGLANESEDSNNNVPRYLNDFYELELQHGSGVVGWSIPVTKGVVPSPRESHTAVIYCKKDSGSPKMYVFGGMCGARLDDLWQLDLETMSWSKPETKGTVPLPRSLHTASVIGNKMYIFGGWVPHKGENTETSPHDCEWRCTSSFSYLNLDTTEWTTLVSDSQEDKKNSRPRPRAGHCAVAIGTRLYFWSGRDGYKKALNSQVCCKDLWYLDTEKPPAPSQVQLIKATTNSFHVKWDEVSTVEGYLLQLSTDLPYQAASSDSSAAPNMQGVRMDPHRQGSNNIVPNSINDTINSTKTEQPATKETSMKNKPDFKALTDSNAILYPSLASNASNHNSHVVDMLRKNEGPHTSANVGVLSSCLDVRTVIPETSVSSTVSSTQTMVTQQTIKTESSSTNGAVVKDETSLTTFSTKSEVDETYALPATKISRVETHATATPFSKETPSNPVATVKAGERQWCDVGIFKNNTALVSQFYLLPKGKQSISKVGNADVPDYSLLKKQDLVPGTGYRFRVAAINGCGIGPFSKISEFKTCIPGFPGAPSAVRISKNVEGIHLSWEPPTSPSGNILEYSAYLAIRTAQIQDNPSQLVFMRIYCGLKTSCIVTAGQLANAHIDYTSRPAIVFRISAKNEKGYGPATQVRWLQGNNKKAPLN

SEQ ID NO: 5035 - protein, 399 aa, Homo sapiens
MAGNAEPPPAGAACPQDRRSCSGRAGGDRVWEDGEHPAKKLKSGGDEERREKPPKRKIVLLMAYSGKGYHGMQRNVGSSQFKTIEDDLVSALVRSGCIPENHGEDMRKMSFQRCARTDKGVSAAGQVVSLKVWLIDDILEKINSHLPSHIRILGLKRVTGGFNSKNRCDARTYCYLLPTFAFAHKDRDVQDETYRLSAETLQQVNRLLACYKGTHNFHNFTSQKGPQDPSACRYILEMYCEEPFVREGLEFAVIRVKGQSFMMHQIRKMVGLVVAIVKGYAPESVLERSWGTEKVDVPKAPGLGLVLERVHFEKYNQRFGNDGLHEPLDWAQEEGKVAAFKEEHIYPTIIGTERDERSMAQWLSTLPIHNFSATALTAGGTGAKVPSPLEGSEGDGDTD

SEQ ID NO: 5036 - protein, 399 aa, Homo sapiens; identical to SEQ ID NO: 5035

SEQ ID NO: 5037 - protein, 427 aa, Homo sapiens
MGLQLRALLGAFGRWTLRLGPRPSCSPRMAGNAEPPPAGAACPQDRRSCSGRAGGDRVWEDGEHPAKKLKSGGDEERREKPPKRKIVLLMAYSGKGYHGMQRNVGSSQFKTIEDDLVSALVRSGCIPENHGEDMRKMSFQRCARTDKGVSAAGQVVSLKVWLIDDILEKINSHLPSHIRILGLKRVTGGFNSKNRCDARTYCYLLPTFAFAHKDRDVQDETYRLSAETLQQVNRLLACYKGTHNFHNFTSQKGPQDPSACRYILEMYCEEPFVREGLEFAVIRVKGQSFMMHQIRKMVGLVVAIVKGYAPESVLERSWGTEKVDVPKAPGLGLVLERVHFEKYNQRFGNDGLHEPLDWAQEEGKVAAFKEEHIYPTIIGTERDERSMAQWLSTLPIHNFSATALTAGGTGAKVPSPLEGSEGDGDTD

SEQ ID NO: 5038 - protein, 3623 aa, Homo sapiens
MMNMSLPFLWSLLTLLIFAEVNGERGELELQRQKRSINLQQPRMATERGNLVFLTGSAQNIEFRTGSLGKIKLNDEDLSECLHQIQKNKEDIIELKGSAIGLPQNISSQIYQLNSKLVDLERKFQGLQQTVDKKVCSSNPCQNGGNCLNLHDSFFCICPPQWKGPLCSADVNECEIYSGTPLSCQNGGTCVNTMGSYSCHCPPETYGPQCASKYDDCEGGSVARCVHGICEDLMREQAGEPKYSCVCDAGWMSSPNSPACTLDRDECSFQPGPCSTLVQCFNTQGSFYCGACPTGWQGNGYICEDINECEINNGGCSVAPPVECVNTPGSSHCQACPPGYQGDGRVCTLTDICSVSNGGCHPDASCSSTLGSLPLCTCLPGYTGNGYGPNGCVQLSNICLSHPCLNGQCIDTVSGYFCKCDSGWTGVNCTENINECLSNPCLNGGTCVDGVDSFSCECTRLWTGALCQVPQQVCGESLSGINGSFSYRSPDVGYVHDVNCFWVIKTEMGKVLRITFTFFRLESMDNCPHEFLQVYDGDSSSAFQLGRFCGSSLPHELLSSDNALYFHLYSEHLRNGRGFTVRWETQQPECGGILTGPYGSIKSPGYPGNYPPGRDCVWIVVTSPDLLVTFTFGTLSLEHHDDCNKDYLEIRDGPLYQDPLLGKFCTTFSVPPLQTTGPFARIHFHSDSQISDQGFHITYLTSPSDLRCGGNYTDPEGELFLPELSGPFTHTRQCVYMMKQPQGEQIQINFTHVELQCQSDSSQNYIEVRDGETLLGKVCGNGTISHIKSITNSVWIRFKIDASVEKASFRAVYQVACGDELTGEGVIRSPFFPNVYPGERTCRWTIHQPQSQVILLNFTVFEIGSSAHCETDYVEIGSSSILGSPENKKYCGTDIPSFITSVYNFLYVTFVKSSSTENHGFMAKFSAEDLACGEILTESTGTIQSPGHPNVYPHGINCTWHILVQPNHLIHLMFETFHLEFHYNCTNDYLEVYDTDSETSLGRYCGKSIPPSLTSSGNSLMLVFVTDSDLAYEGFLINYEAISAATACLQDYTDDLGTFTSPNFPNNYPNNWECIYRITVRTGQLIAVHFTNFSLEEAIGNYYTDFLEIRDGGYEKSPLLGIFYGSNLPPTIISHSNKLWLKFKSDQIDTRSGFSAYWDGSSTGCGGNLTTSSGTFISPNYPMPYYHSSECYWWLKSSHGSAFELEFKDFHLEHHPNCTLDYLAVYDGPSSNSHLLTQLCGDEKPPLIRSSGDSMFIKLRTDEGQQGRGFKAEYRQTCENVVIVNQTYGILESIGYPNPYSENQHCNWTIRATTGNTVNYTFLAFDLEHHINCSTDYLELYDGPRQMGRYCGVDLPPPGSTTSSKLQVLLLTDGVGRREKGFQMQWFVYGCGGELSGATGSFSSPGFPNRYPPNKECIWYIRTDPGSSIQLTIHDFDVEYHSRCNFDVLEIYGGPDFHSPRIAQLCTQRSPENPMQVSSTGNELAIRFKTDLSINGRGFNASWQAVTGGCGGIFQAPSGEIHSPNYPSPYRSNTDCSWVIRVDRYHRVLLNFTDFDLEPQDSCIMAYDGLSSTMSRLARTCGREQLANPIVSSGNSLFLRFQSGPSRQNRGFRAQFRQACGGHILTSSFDTVSSPRFPANYPNNQNCSWIIQAQPPLNHITLSFTHFELERSTTCARDFVEILDGGHEDAPLRGRYCGTDMPHPITSFSSALTLRFVSDSSISAGGFHTTVTASVSACGGTFYMAEGIFNSPGYPDIYPPNVECVWNIISSPGNRLQLSFISFQLEDSQDCSRDFVEIREGNATGHLVGRYCGNSFPLNYSSIVGHTLWVRFISDGSGSGTGFQATFMKIFGNDNIVGTHGKVASPFWPENYPHNSNYQWTVNVNASHVVHGRILEMDIEEIQNCYYDKLRIYDGPSIHARLIGAYCGTQTESFSSTGNSLTFHFYSDSSISGKGFLLEWFAVDAPDGVLPTIAPGACGGFLRTGDAPVFLFSPGWPDSYSNRVDCTWLIQAPDSTVELNILSLDIESHRTCAYDSLVIRDGDNNLAQQLAVLCGREIPGPIRSTGEYMFIRFTSDSSVTRAGFNASFHKSCGGYLHADRGIITSPKYPETYPSNLNCSWHVLVQSGLTIAVHFEQPFQIPNGDSSCNQGDYLVLRNGPDIYSPPLGPPGGNGHFCGSHASSTLFTSDNQMFVQFISDHSNEGQGFKIKYEAKSLACGGNVYIHDADSAGYVTSPNHPHNYPPHADCIWILAAPPETRIQLQFEDRFDIEVTPNCTSNYLELRDGVDSDAPILSKFCGTSLPSSQWSSGEVMYLRFRSDNSPTHVGFKAKYSIAQCGGRVPGQSGVVESIGHPTLPYRDNLFCEWHLQGLSGHYLTISFEDFNLQNSSGCEKDFVEIWDNHTSGNILGRYCGNTIPDSIDTSSNTAVVRFVTDGSVTASGFRLRFESSMEECGGDLQGSIGTFTSPNYPNPNPHGRICEWRITAPEGRRITLMFNNLRLATHPSCNNEHVIVFNGIRSNSPQLEKLCSSVNVSNEIKSSGNTMKVIFFTDGSRPYGGFTASYTSSEDAVCGGSLPNTPEGNFTSPGYDGVRNYSRNLNCEWTLSNPNQGNSSISIHFEDFYLESHQDCQFDVLEFRVGDADGPLMWRLCGPSKPTLPLVIPYSQVWIHFVTNERVEHIGFHAKYSFTDCGGIQIGDSGVITSPNYPNAYDSLTHCSWLLEAPQGHTITLTFSDFDIEPHTTCAWDSVTVRNGGSPESPIIGQYCGNSNPRTIQSGSNQLVVTFNSDHSLQGGGFYATWNTQTLGCGGIFHSDNGTIRSPHWPQNFPENSRCSWTAITHKSKHLEISFDNNFLIPSGDGQCQNSFVKVWAGTEEVDKALLATGCGNVAPGPVITPSNTFTAVFQSQEAPAQGFSASFVSRCGSNFTGPSGYIISPNYPKQYDNNMNCTYVIEANPLSVVLLTFVSFHLEARSAVTGSCVNDGVHIIRGYSVMSTPFATVCGDEMPAPLTIAGPVLLNFYSNEQITDFGFKFSYRIISCGGVFNFSSGIITSPAYSYADYPNDMHCLYTITVSDDKVIELKFSDFDVVPSTSCSHDYLAIYDGANTSDPLLGKFCGSKRPPNVKSSNNSMLLVFKTDSFQTAKGWKMSFRQTLGPQQGCGGYLTGSNNTFASPDSDSNGMYDKNLNCVWIIIAPVNKVIHLTFNTFALEAASTRQRCLYDYVKLYDGDSENANLAGTFCGSTVPAPFISSGNFLTVQFISDLTLEREGFNATYTIMDMPCGGTYNATWTPQNISSPNSSDPDVPFSICTWVIDSPPHQQVKITVWALQLTSQDCTQNYLQLQDSPQGHGNSRFQFCGRNASAVPVFYSSMSTAMVIFKSGVVNRNSRMSFTYQIADCNRDYHKAFGNLRSPGWPDNYDNDKDCTVTLTAPQNHTISLFFHSLGIENSVECRNDFLEVRNGSNSNSPLLGKYCGTLLPNPVFSQNNELYLRFKSDSVTSDRGYEIIWTSSPSGCGGTLYGDRGSFTSPGYPGTYPNNTYCEWVLVAPAGRLVTINFYFISIDDPGDCVQNYLTLYDGPNASSPSSGPYCGGDTSIAPFVASSNQVFIKFHADYARRPSAFRLTWDS

SEQ ID NO: 5039 - protein, 374 aa, Homo sapiens
MAAPPRPAPSPPAPRRLDTSDVLQQIMAITDQSLDEAQARKHALNCHRMKPALFSVLCEIKEKTVVSIRGIQDEDPPDAQLLRLDNMLLAEGVCRPEKRGRGGAVARAGTATPGGCPNDNSIEHSDYRAKLSQIRQIYHSELEKYEQACREFTTHVTNLLQEQSRMRPVSPKEIERMVGAIHGKFSAIQMQLKQSTCEAVMTLRSRLLDARRKRRNFSKQATEVLNEYFYSHLNNPYPSEEAKEELARKGGLTISQVSNWFGNKRIRYKKNMGKFQEEATIYTGKTAVDTTEVGVPGNHASCLSTPSSGSSGPFPLPSAGDAFLTLRTLASLQPPPGGGCLQSQAQGSWQGATPQPATASPAGDPGSINSSTSN

SEQ ID NO: 5040 - protein, 401 aa, Homo sapiens
METGKDGARRGTQSPERKRRSPVPRAPSTKLRPAAAARAMDPVAAEAPGEAFLARRRPEGGGGSARPRYSLLAEIGRGSYGVVYEAVAGRSGARVAVKKIRCDAPENVELALAEFWALTSLKRRHQNVVQFEECVLQRNGLAQRMSHGNKSSQLYLRLVETSLKGERILGYAEEPCYLWFVMEFCEGGDLNQYVLSRRPDPATNKSFMLQLTSAIAFLHKNHIVHRDLKPDNILITERSGTPILKVADFGLSKVCAGLAPRGKEGNQDNKNVNVNKYWLSSACGSDFYMAPEVWEGHYTAKADIFALGIIIWAMIERITFIDSETKKELLGTYIKQGTEIVPVGEALLENPKMELHIPQKRRTSMSEGIKQLLKDMLAANPQDRPDAFELETRMDQVTCAA

SEQ ID NO: 5041 - protein, 162 aa, Homo sapiens
MRAPIPEPKPGDLIEIFRPFYRHWAIYVGDGYVVHLAPPSEVAGAGAASVMSALTDKAIVKKELLYDVAGSDKYQVNNKHDDKYSPLPCTKIIQRAEELVGQEVLYKLTSENCEHFVNELRYGVARSDQVRDVIIAASVAGMGLAAMSLIGVMFSRNKRQKQ

SEQ ID NO: 5042 - protein, 322 aa, Homo sapiens
MEADLSGFNIDAPRWDQRTFLGRVKHFLNITDPRTVFVSERELDWAKVMVEKSRMGVVPPGTQVEQLLYAKKLYDSAFHPDTGEKMNVIGRMSFQLPGGMIITGFMLQFYRTMPAVIFWQWVNQSFNALVNYTNRNAASPTSVRQMALSYFTATTTAVATAVGMNMLTKKAPPLVGRWVPFAAVAAANCVNIPMMRQQELIKGICVKDRNENEIGHSRRAAAIGITQVVISRITMSAPGMILLPVIMERLEKLHFMQKVKVLHAPLQVMLSGCFLIFMVPVACGLFPQKCELPVSYLEPKLQDTIKAKYGELEPYVYFNKGL

SEQ ID NO: 5043 - protein, 468 aa, Homo sapiens
MGTATPDGREDQERLWVSVEDAQMHTVTIWLTVRPDMTVASLKDMVFLDYGFPPVLQQWVIGQRLARDQETLHSHGVRQNGDSAYLYLLSARNTSLNPQELQRERQLRMLEDLGFKDLTLQPRGPLEPGPPKPGVPQEPGRGQPDAVPEPPPVGWQCPGCTFINKPTRPGCEMCCRARPEAYQVPASYQPDEEERARLAGEEEALRQYQQRKQQQQEGNYLQHVQLDQRSLVLNTEPAECPVCYSVLAPGEAVVLRECLHTFCRECLQGTIRNSQEAEVSCPFIDNTYSCSGKLLEREIKALLTPEDYQRFLDLGISIAENRSAFSYHCKTPDCKGWCFFEDDVNEFTCPVCFHVNCLLCKAIHEQMNCKEYQEDLALRAQNDVAARQTTEMLKVMLQQGEAMRCPQCQIVVQKKDGCDWIRCTVCHTEICWVTKGPRWGPGGPGDTSGGCRCRVNGIPCHPSCQNCH

SEQ ID NO: 5044 - protein, 500 aa, Homo sapiens
MALSLTRAVAGGDEQVAMKCAIWLAEQRVPLSVQLKPEVSPTQDIRLWVSVEDAQMHTVTIWLTVRPDMTVASLKDMVFLDYGFPPVLQQWVIGQRLARDQETLHSHGVRQNGDSAYLYLLSARNTSLNPQELQRERQLRMLEDLGFKDLTLQPRGPLEPGPPKPGVPQEPGRGQPDAVPEPPPVGWQCPGCTFINKPTRPGCEMCCRARPEAYQVPASYQPDEEERARLAGEEEALRQYQQRKQQQQEGNYLQHVQLDQRSLVLNTEPAECPVCYSVLAPGEAVVLRECLHTFCRECLQGTIRNSQEAEVSCPFIDNTYSCSGKLLEREIKALLTPEDYQRFLDLGISIAENRSAFSYHCKTPDCKGWCFFEDDVNEFTCPVCFHVNCLLCKAIHEQMNCKEYQEDLALRAQNDVAARQTTEMLKVMLQQGEAMRCPQCQIVVQKKDGCDWIRCTVCHTEICWVTKGPRWGPGGPGDTSGGCRCRVNGIPCHPSCQNCH

SEQ ID NO: 5045 - protein, 870 aa, Homo sapiens
MGNRGMEELIPLVNKLQDAFSSIGQSCHLDLPQIAVVGGQSAGKSSVLENFVGRDFLPRGSGIVTRRPLILQLIFSKTEHAEFLHCKSKKFTDFDEVRQEIEAETDRVTGTNKGISPVPINLRVYSPHVLNLTLIDLPGITKVPVGDQPPDIEYQIKDMILQFISRESSLILAVTPANMDLANSDALKLAKEVDPQGLRTIGVITKLDLMDEGTDARDVLENKLLPLRRGYIGVVNRSQKDIEGKKDIRAALAAERKFFLSHPAYRHMADRMGTPHLQKTLNQQLTNHIRESLPALRSKLQSQLLSLEKEVEEYKNFRPDDPTRKTKALLQMVQQFGVDFEKRIEGSGDQVDTLELSGGARINRIFHERFPFELVKMEFDEKDLRREISYAIKNIHGVRTGLFTPDLAFEAIVKKQVVKLKEPCLKCVDLVIQELINTVRQCTSKLSSYPRLREETERIVTTYIREREGRTKDQILLLIDIEQSYINTNHEDFIGFANAQQRSTQLNKKRAIPNQGEILVIRRGWLTINNISLMKGGSKEYWFVLTAESLSWYKDEEEKEKKYMLPLDNLKIRDVEKGFMSNKHVFAIFNTEQRNVYKDLRQIELACDSQEDVDSWKASFLRAGVYPEKDQAENEDGAQENTFSMDPQLERQVETIRNLVDSYVAIINKSIRDLMPKTIMHLMINNTKAFIHHELLAYLYSSADQSSLMEESADQAQRRDDMLRMYHALKEALNIIGDISTSTVSTPVPPPVDDTWLQSASSHSPTPQRRPVSSIHPPGRPPAVRGPTPGPPLIPVPVGAAASFSAPPIPSRPGPQSVFANSDLFPAPPQIPSRPVRIPPGIPPGVPSRRPPAAPSRPTIIRPAEPSLLD

SEQ ID NO: 5046 - protein, 870 aa, Homo sapiens
MGNRGMEELIPLVNKLQDAFSSIGQSCHLDLPQIAVVGGQSAGKSSVLENFVGRDFLPRGSGIVTRRPLILQLIFSKTEHAEFLHCKSKKFTDFDEVRQEIEAETDRVTGTNKGISPVPINLRVYSPHVLNLTLIDLPGITKVPVGDQPPDIEYQIKDMILQFISRESSLILAVTPANMDLANSDALKLAKEVDPQGLRTIGVITKLDLMDEGTDARDVLENKLLPLRRGYIGVVNRSQKDIEGKKDIRAALAAERKFFLSHPAYRHMADRMGTPHLQKTLNQQLTNHIRESLPALRSKLQSQLLSLEKEVEEYKNFRPDDPTRKTKALLQMVQQFGVDFEKRIEGSGDQVDTLELSGGARINRIFHERFPFELVKMEFDEKDLRREISYAIKNIHGVRTGLFTPDMAFEAIVKKQIVKLKEPSLKCVDLVVSELATVIKKCAEKLSSYPRLREETERIVTTYIREREGRTKDQILLLIDIEQSYINTNHEDFIGFANAQQRSTQLNKKRAIPNQGEILVIRRGWLTINNISLMKGGSKEYWFVLTAESLSWYKDEEEKEKKYMLPLDNLKIRDVEKGFMSNKHVFAIFNTEQRNVYKDLRQIELACDSQEDVDSWKASFLRAGVYPEKDQAENEDGAQENTFSMDPQLERQVETIRNLVDSYVAIINKSIRDLMPKTIMHLMINNTKAFIHHELLAYLYSSADQSSLMEESADQAQRRDDMLRMYHALKEALNIIGDISTSTVSTPVPPPVDDTWLQSASSHSPTPQRRPVSSIHPPGRPPAVRGPTPGPPLIPVPVGAAASFSAPPIPSRPGPQSVFANSDLFPAPPQIPSRPVRIPPGIPPGVPSRRPPAAPSRPTIIRPAEPSLLD

SEQ ID NO: 5047 - protein, 866 aa, Homo sapiens
MGNRGMEELIPLVNKLQDAFSSIGQSCHLDLPQIAVVGGQSAGKSSVLENFVGRDFLPRGSGIVTRRPLILQLIFSKTEHAEFLHCKSKKFTDFDEVRQEIEAETDRVTGTNKGISPVPINLRVYSPHVLNLTLIDLPGITKVPVGDQPPDIEYQIKDMILQFISRESSLILAVTPANMDLANSDALKLAKEVDPQGLRTIGVITKLDLMDEGTDARDVLENKLLPLRRGYIGVVNRSQKDIEGKKDIRAALAAERKFFLSHPAYRHMADRMGTPHLQKTLNQQLTNHIRESLPALRSKLQSQLLSLEKEVEEYKNFRPDDPTRKTKALLQMVQQFGVDFEKRIEGSGDQVDTLELSGGARINRIFHERFPFELVKMEFDEKDLRREISYAIKNIHGVRTGLFTPDMAFEAIVKKQIVKLKEPSLKCVDLVVSELATVIKKCAEKLSSYPRLREETERIVTTYIREREGRTKDQILLLIDIEQSYINTNHEDFIGFANAQQRSTQLNKKRAIPNQVIRRGWLTINNISLMKGGSKEYWFVLTAESLSWYKDEEEKEKKYMLPLDNLKIRDVEKGFMSNKHVFAIFNTEQRNVYKDLRQIELACDSQEDVDSWKASFLRAGVYPEKDQAENEDGAQENTFSMDPQLERQVETIRNLVDSYVAIINKSIRDLMPKTIMHLMINNTKAFIHHELLAYLYSSADQSSLMEESADQAQRRDDMLRMYHALKEALNIIGDISTSTVSTPVPPPVDDTWLQSASSHSPTPQRRPVSSIHPPGRPPAVRGPTPGPPLIPVPVGAAASFSAPPIPSRPGPQSVFANSDLFPAPPQIPSRPVRIPPGIPPGVPSRRPPAAPSRPTIIRPAEPSLLD

SEQ ID NO: 5048 - protein, 866 aa, Homo sapiens
MGNRGMEELIPLVNKLQDAFSSIGQSCHLDLPQIAVVGGQSAGKSSVLENFVGRDFLPRGSGIVTRRPLILQLIFSKTEHAEFLHCKSKKFTDFDEVRQEIEAETDRVTGTNKGISPVPINLRVYSPHVLNLTLIDLPGITKVPVGDQPPDIEYQIKDMILQFISRESSLILAVTPANMDLANSDALKLAKEVDPQGLRTIGVITKLDLMDEGTDARDVLENKLLPLRRGYIGVVNRSQKDIEGKKDIRAALAAERKFFLSHPAYRHMADRMGTPHLQKTLNQQLTNHIRESLPALRSKLQSQLLSLEKEVEEYKNFRPDDPTRKTKALLQMVQQFGVDFEKRIEGSGDQVDTLELSGGARINRIFHERFPFELVKMEFDEKDLRREISYAIKNIHGVRTGLFTPDLAFEAIVKKQVVKLKEPCLKCVDLVIQELINTVRQCTSKLSSYPRLREETERIVTTYIREREGRTKDQILLLIDIEQSYINTNHEDFIGFANAQQRSTQLNKKRAIPNQVIRRGWLTINNISLMKGGSKEYWFVLTAESLSWYKDEEEKEKKYMLPLDNLKIRDVEKGFMSNKHVFAIFNTEQRNVYKDLRQIELACDSQEDVDSWKASFLRAGVYPEKDQAENEDGAQENTFSMDPQLERQVETIRNLVDSYVAIINKSIRDLMPKTIMHLMINNTKAFIHHELLAYLYSSADQSSLMEESADQAQRRDDMLRMYHALKEALNIIGDISTSTVSTPVPPPVDDTWLQSASSHSPTPQRRPVSSIHPPGRPPAVRGPTPGPPLIPVPVGAAASFSAPPIPSRPGPQSVFANSDLFPAPPQIPSRPVRIPPGIPPGVPSRRPPAAPSRPTIIRPAEPSLLD

SEQ ID NO: 5049 - protein, 828 aa, Homo sapiens
MRFLEARSLAVAMGDTVVEPAPLKPTSEPTSGPPGNNGGSLLSVITEGVGELSVIDPEVAQKACQEVLEKVKLLHGGVAVSSRGTPLELVNGDGVDSEIRCLDDPPAQIREEEDEMGAAVASGTAKGARRRRQNNSAKQSWLLRLFESKLFDISMAISYLYNSKEPGVQAYIGNRLFCFRNEDVDFYLPQLLNMYIHMDEDVGDAIKPYIVHRCRQSINFSLQCALLLGAYSSDMHISTQRHSRGTKLRKLILSDELKPAHRKRELPSLSPAPDTGLSPSKRTHQRSKSDATASISLSSNLKRTASNPKVENEDEELSSSTESIDNSFSSPVRLAPEREFIKSLMAIGKRLATLPTKEQKTQRLISELSLLNHKLPARVWLPTAGFDHHVVRVPHTQAVVLNSKDKAPYLIYVEVLECENFDTTSVPARIPENRIRSTRSVENLPECGITHEQRAGSFSTVPNYDNDDEAWSVDDIGELQVELPEVHTNSCDNISQFSVDSITSQESKEPVFIAAGDIRRRLSEQLAHTPTAFKRDPEDPSAVALKEPWQEKVRRIREGSPYGHLPNWRLLSVIVKCGDDLRQELLAFQVLKQLQSIWEQERVPLWIKPYKILVISADSGMIEPVVNAVSIHQVKKQSQLSLLDYFLQEHGSYTTEAFLSAQRNFVQSCAGYCLVCYLLQVKDRHNGNILLDAEGHIIHIDFGFILSSSPRNLGFETSAFKLTTEFVDVMGGLDGDMFNYYKMLMLQGLIAARKHMDKVVQIVEIMQQGSQLPCFHGSSTIRNLKERFHMSMTEEQLQLLVEQMVDGSMRSITTKLYDGFQYLTNGIM

SEQ ID NO: 5050 - protein, 174 aa, Homo sapiens
MAAAAELSLLEKSLGLSKGNKYSAQGERQIPVLQTNNGPSLTGLTTIAAHLVKQANKEYLLGSTAEEKAIVQQWLEYRVTQVDGHSSKNDIHTLLKDLNSYLEDKVYLTGYNFTLADILLYYGLHRFIVDLTVQEKEKYLNVSRWFCHIQHYPGIRQHLSSVVFIKNRLYTNSH

SEQ ID NO: 5051 - protein, 1107 aa, Homo sapiens
MDGKRRPGPGPGVPPKRARGGLWDDDDAPWPSQFEEDLALMEEMEAEHRLQEQEEEELQSVLEGVADGQVPPSAIDPRWLRPTPPALDPQTEPLIFQQLEIDHYVGPAQPVPGGPPPSRGSVPVLRAFGVTDEGFSVCCHIHGFAPYFYTPAPPGFGPEHMGDLQRELNLAISRDSRGGRELTGPAVLAVELCSRESMFGYHGHGPSPFLRITVALPRLVAPARRLLEQGIRVAGLGTPSFAPYEANVDFEIRFMVDTDIVGCNWLELPAGKYALRLKEKATQCQLEADVLWSDVVSHPPEGPWQRIAPLRVLSFDIECAGRKGIFPEPERDPVIQICSLGLRWGEPEPFLRLALTLRPCAPILGAKVQSYEKEEDLLQAWSTFIRIMDPDVITGYNIQNFDLPYLISRAQTLKVQTFPFLGRVAGLCSNIRDSSFQSKQTGRRDTKVVSMVGRVQMDMLQVLLREYKLRSHTLNAVSFHFLGEQKEDVQHSIITDLQNGNDQTRRRLAVYCLKDAYLPLRLLERLMVLVNAVEMARVTGVPLSYLLSRGQQVKVVSQLLRQAMHEGLLMPVVKSEGGEDYTGATVIEPLKGYYDVPIATLDFSSLYPSIMMAHNLCYTTLLRPGTAQKLGLTEDQFIRTPTGDEFVKTSVRKGLLPQILENLLSARKRAKAELAKETDPLRRQVLDGRQLALKVSANSVYGFTGAQVGKLPCLEISQSVTGFGRQMIEKTKQLVESKYTVENGYSTSAKVVYGDTDSVMCRFGVSSVAEAMALGREAADWVSGHFPSPIRLEFEKVYFPYLLISKKRYAGLLFSSRPDAHDRMDCKGLEAVRRDNCPLVANLVTASLRRLLIDRDPEGAVAHAQDVISDLLCNRIDISQLVITKELTRAASDYAGKQAHVELAERMRKRDPGSAPSLGDRVPYVIISAAKGVAAYMKSEDPLFVLEHSLPIDTQYYLEQQLAKPLLRIFEPILGEGRAEAVLLRGDHTRCKTVLTGKVGGLLAFAKRRNCCIGCRTVLSHQGAVCEFCQPRESELYQKEVSHLNALEERFSRLWTQCQRCQGSLHEDVICTSRDCPIFYMRKKVRKDLEDQEQLLRRFGPPGPEAW

SEQ ID NO: 5052 - protein, 477 aa, Homo sapiens
MATYTCITCRVAFRDADMQRAHYKTDWHRYNLRRKVASMAPVTAEGFQERVRAQRAVAEEESKGSATYCTVCSKKFASFNAYENHLKSRRHVELEKKAVQAVNRKVEMMNEKNLEKGLGVDSVDKDAMNAAIQQAIKAQPSMSPKKAPPAPAKEARNVVAVGTGGRGTHDRDPSEKPPRLQWFEQQAKKLAKQQEEDSEEEEEDLDGDDWEDIDSDEELECEDTEAMDDVVEQDAEEEEAEEGPPLGAIPITDCLFCSHHSSSLMKNVAHMTKDHSFFIPDIEYLSDIKGLIKYLGEKVGVGKICLWCNEKGKSFYSTEAVQAHMNDKSHCKLFTDGDAALEFADFYDFRSSYPDHKEGEDPNKAEELPSEKNLEYDDETMELILPSGARVGHRSLMRYYKQRFGLSRAVAVAKNRKAVGRVLQQYRALGWTGSTGAALMRERDMQYVQRMKSKWMLKTGMKNNATKQMHFRVQVRF

SEQ ID NO: 5053 - protein, 269 aa, Homo sapiens
MQPGCAVPQSGRLRGSSRGPGRSGPGMAAAGGGSAVEPRRGGRHHRCPQSARCPAVRSGPLLQTRCPECAGAARQVLALLARPRRRGPGSRSPTPTSAGPACPLFWFHLFCIFMLACYIPWPLSVLWQFPKHLGKKELGQLHNRWGRAGEGPRPDRQSFKGWRAGGLSTLSFGTGVRRQPLATTVSLLCRFTWGWTSPFQLWRVTPQRAWCRDHHQLGRWERRCPRLGEGGNLFPAPQVIVARSGEGTVVPRFPVCQLRDSAVLLCLFD

SEQ ID NO: 5054 - protein, 122 aa, Homo sapiens
MTTATRQEVLGLYRSIFRLARKWQATSGQMEDTIKEKQYILNEARTLFRKNKNLTDTDLIKQCIDECTARIEIGLHYKIPYPRPIHLPPMGLTPLRGRGLRSQEKLRKLSKPVYLRSHDEVS

SEQ ID NO: 5055 - protein, 2649 aa, Homo sapiens
MAVWEAEQLGGLQRGDLLTPPAPDGDGRTAPLGQPPGAQLYCPACLVTCHSQEAFENHCASSEHAQMVAFDQALPWEHRSPPPGLSKFELCPKPDLCEYGDACTKAHSAQELQEWVRRTQAVELRGQAAWQDGLVPYQERLLAEYQRSSSEVLVLAETLDGVRVTCNQPLMYQAQERKTQYSWTFAVHSEEPLLHAALLKQEPGADFSLVAPGLPPGRLYARGERFRVPSSTADFQVGVRVQAASFGTFEQWVVFDFGRRPVLLQKLGLQLGQGRRPGPCRNLALGHPEEMERWHTGNRHVVPGVERTAEQTALMAKYKGPALALESNHSSVASGPISPTNYRQRMHQFLYEEEAAQQQLVAKLTLRGQVFLKTALQTPALNMLFAPPGALYAEVPVPSSLMPDTDQGFLLGRAVSTALVAPVPAPDNTVFEVRLERRASSEQALWLLLPARCCLALGLQPEARLVLEVQFQIDPMTFRLWHQAVDTLPEEQLVVPDLPTCALPRPWSVPPLRRGNRKQELAVALIAGWGPGDGRRVPPLLIYGPFGTGKTYTLAMASLEVIRRPETKVLICTHTNSAADIYIREYFHSHVSGGHPEATPLRVMYTDRPLSQTDPVTLQYCCLTDDRQAFRPPTRAELARHRVVVTTTSQARELRVPVGFFSHILIDEAAQMLECEALTPLAYASHGTRLVLAGDHMQVTPRLFSVARARAAEHTLLHRLFLCYQQETHEVARQSRLVFHENYRCTDAIVSFISRHFYVAKGNPIHARGKVPPHPRHYPLMFCHVAGNPDRDMSMASWLNLAEIAQVVEKVQEAYNTWPSCWGGREQRCICVVSHGAQVSALRQELRRRDLGQVSVGSFEILPGRQFRVVVLSTVHTCQSLLSPGALAPEFFTDARVLNTVLTRAQSQLVVVGDAVALCSFGACGKLWESFIRECVERHSVCPEGLSMEQVEQGVAQRRRWPPRGTQAGAAGNWEAAPEPVGDLAEEQAAVVTAMVKAEPGDEALSPASRDITATTAQTEAAAAPAGDAVKEDVVPGACAAGAAAAAGVESTEAEDAEADFWPWDGELNADDAILRELLDESQKVMVTVGEDGLLDTVARPESLQQARLYENLPPAALRKLLRAEPERYRHCSFVPETFERASAIPLDDASSGPIQVRGRLDCGMAFAGDEVLVQLLSGDKAPEGRLRGRVLGVLKRKRHELAFVCRMDTWDPRIMVPINGSVTKIFVAELKDPSQVPIYSLRKGRLQRVGLERLTAEARHSRLFWVQIVLWRQGFYYPLGIVREVLPEASTWEQGLRILGLEYSLRVPPSDQATITKVLQKYHTELGRVAGRREDCRAFLTFTVDPQGACNLDDALSVRDLGPRCEVAVHITDVASFVPRDGVLDVEARRQGAAFYAPGREPVPMLPASLCQDVLSLLPGRDRLAISLFLTMEKASGQLKSLRFAPSVVQSDRQLSYEEAEEVIRQHPGAGRELPARLDSVDACVVAACYFSRLLRRHRLRSDCFYEQPDEDGTLGFRAAHIMVKEYMIQFNRLVAEFLVGSECTRTVTPLRWQPAPRSQQLKALCEKHGDRVPLSLHLGHHLHGGGGSPPDTRLHLLASLWKQVQFAARTQDYEQMVDLVTTDDMHPFLAPAGRDLRKALERSAFGRCARGHQQQGGHYSLQVDWYTWATSPIRRYLDVVLQRQILLALGHGGSAYSARDIDGLCQAFSLQHALAQSYQRRARSLHLAVQLKAQPLDKLGFVVDVEAGSRCFRLLFPSNRETLPDPCPVPYGSLQLAEHPHALAGRPGLRLLWRRRVYSAQGSSPPLPLPGTVPDPHTLAVETALWKQLLELVELQRWPEAAALIQEKGEASQRRELVQVQRSHCGHFLEVARELGSGDTLQVQLGTSLQHGFLVPSPQLWTVAPGFSLCLEHVERPGDCFSGRVYRAPRDRYRDVDEYACVWEPFCALESATGAVAENDSVTLQHLSVSWEASRTPQGQLQGAFRLEAAFLEENCADINFSCCYLCIRLEGLPAPTASPRPGPSSLGPGLNVDPGTYTWVAHGQTQDWDQERRADRQEAPRRVHLFVHHMGMEKVPEEVLRPGTLFTVELLPKQLPDLRKEEAVRGLEEASPLVTSIALGRPVPQPLCRVIPSRFLERQTYNIPGGRHKLNPSQNVAVREALEKPFTVIQGPPGTGKTIVGLHIVFWFHKSNQEQVQPGGPPRGEKRLGGPCILYCGPSNKSVDVLAGLLLRRMELKPLRVYSEQAEASEFPVPRVGSRKLLRKSPREGRPNQSLRSITLHHRIRQAPNPYSSEIKAFDTRLQRGELFSREDLVWYKKVLWEARKFELDRHEVILCTCSCAASASLKILDVRQILVDEAGMATEPETLIPLVQFPQAEKVVLLGDHKQLRPVVKNERLQNLGLDRSLFERYHEDAHMLDTQYRMHEGICAFPSVAFYKSKLKTWQGLRRPPSVLGHAGKESCPVIFGHVQGHERSLLVSTDEGNENSKANLEEVAEVVRITKQLTLGRTVEPQDIAVLTPYNAQASEISKALRREGIAGVAVSSITKSQGSEWRYVLVSTVRTCAKSDLDQRPTKSWLKKFLGFVVDPNQVNVAVTRAQEGLCLIGDHLLLRCCPLWRSLLDFCEAQQTLVPAGQVRVCRRPTMPS

SEQ ID NO: 5056 - protein, 2080 aa, Homo sapiens
MSSSPSRSAADIYIREYFHSHVSGGHPEATPLRVMYTDRPLSQTDPVTLQYCCLTDDRQAFRPPTRAELARHRVVVTTTSQARELRVPVGFFSHILIDEAAQMLECEALTPLAYASHGTRLVLAGDHMQVTPRLFSVARARAAEHTLLHRLFLCYQQETHEVARQSRLVFHENYRCTDAIVSFISRHFYVAKGNPIHARGKVPPHPRHYPLMFCHVAGNPDRDMSMASWLNLAEIAQVVEKVQEAYNTWPSCWGGREQRCICVVSHGAQVSALRQELRRRDLGQVSVGSFEILPGRQFRVVVLSTVHTCQSLLSPGALAPEFFTDARVLNTVLTRAQSQLVVVGDAVALCSFGACGKLWESFIRECVERHSVCPEGLSMEQVEQGVAQRRRWPPRGTQAGAAGNWEAAPEPVGDLAEEQAAVVTAMVKAEPGDEALSPASRDITATTAQTEAAAAPAGDAVKEDVVPGACAAGAAAAAGVESTEAEDAEADFWPWDGELNADDAILRELLDESQKVMVTVGEDGLLDTVARPESLQQARLYENLPPAALRKLLHAEPERYRHCSFVPETFERASAIPLDDASSGPIQVRGRLDCGMAFAGDEVLVQLLSGDKAPEGRLRGRVLGVLKRKRHELAFVCRMDTWDPRIMVPINGSVTKIFVAELKDPSQVPIYSLRKGRLQRVGLERLTAEARHSRLFWVQIVLWRQGFYYPLGIVREVLPEASTWEQGLRILGLEYSLRVPPSDQATITKVLQKYHTELGRVAGRREDCRAFLTFTVDPQGACNLDDALSVRDLGPRCEVAVHITDVASFVPRDGVLDVEARRQGAAFYAPGREPVPMLPASLCQDVLSLLPGRDRLAISLFLTMEKASGQLKSLRFAPSVVQSDRQLSYEEAEEVIRQHPGAGRELPARLDSVDACVVAACYFSRLLRRHRLRSDCFYEQPDEDGTLGFRAAHIMVKEYMIQFNRLVAEFLVGSECTRTVTPLRWQPAPRSQQLKALCEKHGDRVPLSLHLGHHLHGGGGSPPDTRLHLLASLWKQVQFAARTQDYEQMVDLVTTDDMHPFLAPAGRDLRKALERSAFGRCARGHQQQGGHYSLQVDWYTWATSPIRRYLDVVLQRQILLALGHGGSAYSARDIDGLCQAFSLQHALAQSYQRRARSLHLAVQLKAQPLDKLGFVVDVEAGSRCFRLLFPSNRETLPDPCPVPYGSLQLAEHPHALAGRPGLRLLWRRRVYSAQGSSPPLPLPGTVPDPHTLAVETALWKQLLELVELQRWPEAAALIQEKGEASQRRELVQVQRSHCGHFLEVARELGSGDTLQVQLGTSLQHGFLVPSPQLWTVAPGFSLCLEHVERPGDCFSGRVYRAPRDRYRDVDEYACVWEPFCALESATGAVAENDSVTLQHLSVSWEASRTPQGQLQGAFRLEAAFLEENCADINFSCCYLCIRLEGLPAPTASPRPGPSSLGPGLNVDPGTYTWVAHGQTQDWDQERRADRQEAPRRVHLFVHHMGMEKVPEEVLRPGTLFTVELLPKQLPDLRKEEAVRGLEEASPLVTSIALGRPVPQPLCRVIPSRFLERQTYNIPGGRHKLNPSQNVAVREALEKPFTVIQGPPGTGKTIVGLHIVFWFHKSNQEQVQPGGPPRGEKRLGGPCILYCGPSNKSVDVLAGLLLRRMELKPLRVYSEQAEASEFPVPRVGSRKLLRKSPREGRPNQSLRSITLHHRIRQAPNPYSSEIKAFDTRLQRGELFSREDLVWYKKVLWEARKFELDRHEVILCTCSCAASASLKILDVRQILVDEAGMATEPETLIPLVQFPQAEKVVLLGDHKQLRPVVKNERLQNLGLDRSLFERYHEDAHMLDTQYRMHEGICAFPSVAFYKSKLKTWQGLRRPPSVLGHAGKESCPVIFGHVQGHERSLLVSTDEGNENSKANLEEVAEVVRITKQLTLGRTVEPQDIAVLTPYNAQASEISKALRREGIAGVAVSSITKSQGSEWRYVLVSTVRTCAKSDLDQRPTKSWLKKFLGFVVDPNQVNVAVTRAQEGLCLIGDHLLLRCCPLWRSLLDFCEAQQTLVPAGQVRVCRRPTMPS

SEQ ID NO: 5057 - protein, 221 aa, Homo sapiens
MSETAPLAPTIPAPAEKTPVKKKAKKAGATAGKRKASGPPVSELITKAVAASKERSGVSLAALKKALAAAGYDVEKNNSRIKLGLKSLVSKGTLVQTKGTGASGSFKLNKKAASGEGKPKAKKAGAAKPRKPAGAAKKPKKVAGAATPKKSIKKTPKKVKKPATAAGTKKVAKSAKKVKTPQPKKAAKSPAKAKAPKPKAAKPKSGKPKVTKAKKAAPKKK

SEQ ID NO: 5058 - protein, 552 aa, Homo sapiens
MEPAMEPETLEARINRATNPLNKELDWASINGFCEQLNEDFEGPPLATRLLAHKIQSPQEWEAIQALTVLETCMKSCGKRFHDEVGKFRFLNELIKVVSPKYLGSRTSEKVKNKILELLYSWTVGLPEEVKIAEAYQMLKKQGIVKSDPKLPDDTTFPLPPPRPKNVIFEDEEKSKMLARLLKSSHPEDLRAANKLIKEMVQEDQKRMEKISKRVNAIEEVNNNVKLLTEMVMSHSQGGAAAGSSEDLMKELYQRCERMRPTLFRLASDTEDNDEALGLSDPTPPSGPSLDGTGWNSFQSSDATEPPAPALAQAPSMESRPPAQTSLPASSGLDDLDLLGKTLLQQSLPPESQQVRWEKQQPTPRLTLRDLQNKSSSCSSPSSSATSLLHTVSPEPPRPPQQPVPTELSLASITVPLESIKPSNILPVTVYDQHGFRILFHFARDPLPGRSDVLVVVVSMLSTAPQPIRNIVFQSAVPKVMKVKLQPPSGTELPAFNPIVHPSAITQVLLLANPQKEKVRLRYKLTFTMGDQTYNEMGDVDQFPPPETWGSL

SEQ ID NO: 5059 - protein, 89 aa, Homo sapiens
MEPAMEPETLEARINRATNPLNKELDWASINGFCEQLNEDFEGPPLATRLLAHKIQSPQEWEAIQALTVRRGEATIRPPPCDDTKGGQD

SEQ ID NO: 5060 - protein, 639 aa, Homo sapiens
MEPAMEPETLEARINRATNPLNKELDWASINGFCEQLNEDFEGPPLATRLLAHKIQSPQEWEAIQALTVLETCMKSCGKRFHDEVGKFRFLNELIKVVSPKYLGSRTSEKVKNKILELLYSWTVGLPEEVKIAEAYQMLKKQGIVKSDPKLPDDTTFPLPPPRPKNVIFEDEEKSKMLARLLKSSHPEDLRAANKLIKEMVQEDQKRMEKISKRVNAIEEVNNNVKLLTEMVMSHSQGGAAAGSSEDLMKELYQRCERMRPTLFRLASDTEDNDEALAEILQANDNLTQVINLYKQLVRGEEVNGDATAGSIPGSTSALLDLSGLDLPPAGTTYPAMPTRPGEQASPEQPSASVSLLDDELMSLGLSDPTPPSGPSLDGTGWNSFQSSDATEPPAPALAQAPSMESRPPAQTSLPASSGLDDLDLLGKTLLQQSLPPESQQVRWEKQQPTPRLTLRDLQNKSSSCSSPSSSATSLLHTVSPEPPRPPQQPVPTELSLASITVPLESIKPSNILPVTVYDQHGFRILFHFARDPLPGRSDVLVVVVSMLSTAPQPIRNIVFQSAVPKVMKVKLQPPSGTELPAFNPIVHPSAITQVLLLANPQKEKVRLRYKLTFTMGDQTYNEMGDVDQFPPPETWGSL

SEQ ID NO: 5061 - protein, 1761 aa, Homo sapiens
MADAAASPVGKRLLLLFADTAASASASAPAAAAASGDPGPALRTRAWRAGTVRAMSGAVPQDLAIFVEFDGCNWKQHSWVKVHAEEVIVLLLEGSLVWAPREDPVLLQGIRVSIAQWPALTFTPLVDKLGLGSVVPVEYLLDRELRFLSDANGLHLFQMGTDSQNQILLEHAALRETVNALISDQKLQEIFSRGPYSVQGHRVKIYQPEGEEGWLYGVVSHQDSITRLMEVSVTESGEIKSVDPRLIHVMLMDNSTPQSEGGTLKAVKSSKGKKKRESIEGKDGRRRKSASDSGCDPASKKLKGDRGEVDSNGSDGGEASRGPWKGGNASGEPGLDQRAKQPPSTFVPQINRNIRFATYTKENGRTLVVQDEPVGGDTPASFTPYSTATGQTPLAPEVGGAENKEAGKTLEQVGQGIVASAAVVTTASSTPNTVRISDTGLAAGTVPEKQKGSRSQASGENSRNSILASSGFGAPLPSSSQPLTFGSGRSQSNGVLATENKPLGFSFGCSSAQEAQKDTDLSKNLFFQCMSQTLPTSNYFTTVSESLADDSSSRDSFKQSLESLSSGLCKGRSVLGTDTKPGSKAGSSVDRKVPAESMPTLTPAFPRSLLNARTPENHENLFLQPPKLSREEPSNPFLAFVEKVEHSPFSSFASQASGSSSSATTVTSKVAPSWPESHSSADSASLAKKKPLFITTDSSKLVSGVLGSALTSGGPSLSAMGNGRSSSPTSSLTQPIEMPTLSSSPTEERPTVGPGQQDNPLLKTFSNVFGRHSGGFLSSPADFSQENKAPFEAVKRFSLDERSLACRQDSDSSTNSDLSDLSDSEEQLQAKTGLKGIPEHLMGKLGPNGERSAELLLGKSKGKQAPKGRPRTAPLKVGQSVLKDVSKVKKLKQSGEPFLQDGSCINVAPHLHKCRECRLERYRKFKEQEQDDSTVACRFFHFRRLIFTRKGVLRVEGFLSPQQSDPDAMNLWIPSSSLAEGIDLETSKYILANVGDQFCQLVMSEKEAMMMVEPHQKVAWKRAVRGVREMCDVCETTLFNIHWVCRKCGFGVCLDCYRLRKSRPRSETEEMGDEEVFSWLKCAKGQSHEPENLMPTQIIPGTALYNIGDMVHAARGKWGIKANCPCISRQNKSVLRPAVTNGMSQLPSINPSASSGNETTFSGGGGPAPVTTPEPDHVPKADSTDIRSEEPLKTDSSASNSNSELKAIRPPCPDTAPPSSALHWLADLATQKAKEETKEAGSLRSVLNKESHSPFGLDSFNSTAKVSPLTPKLFNSLLLGPTASNNKTEGSSLRDLLHSGPGKLPQTPLDTGIPFPPVFSTSSAGVKSKASLPNFLDHIIASVVENKKTSDASKRACNLTDTQKEVKEMVMGLNVLDPHTSHSWLCDGRLLCLHDPSNKNNWKIFRECWKQGQPVLVSGVHKKLKSELWKPEAFSQEFGDQDVDLVNCRNCAIISDVKVRDFWDGFEIICKRLRSEDGQPMVLKLKDWPPGEDFRDMMPTRFEDLMENLPLPEYTKRDGRLNLASRLPSYFVRPDLGPKMYNAYGLITAEDRRVGTTNLHLDVSDAVNVMVYVGIPIGEGAHDEEVLKTIDEGDADEVTKQRIHDGKEKPGALWHIYAAKDAEKIRELLRKVGEEQGQENPPDHDPIHDQSWYLDQTLRKRLYEEYGVQGWAIVQFLGDAVFIPAGAPHQVHNLYSCIKVAEDFVSPEHVKHCFRLTQEFRHLSNTHTNHEDKLQVKNIIYHAVKDAVGTLKAHESKLARS

SEQ ID NO: 5062 - protein, 970 aa, Homo sapiens
MLCFLDDGAGMDPSDAASVIQFGKSAKRTPESTQIGQYGNGLKSGSMRIGKDFILFTKKEDTMTCLFLSRTFHEEEGIDEVIVPLPTWNARTREPVTDNVEKFAIETELIYKYSPFRTEEEVMTQFMKIPGDSGTLVIIFNLKLMDNGEPELDIISNPRDIQMAETSPEGTKPERRSFRAYAAVLYIDPRMRIFIHGHKVQTKRLSCCLYKPRMYKYTSSRFKTRAEQEVKKAEHVARIAEEKAREAESKARTLEVRLGGDLTRDSRVMLRQVQNRAITLRREADVKKRIKEAKQRALKEPKELNFVFGVNIEHRDLDGMFIYNCSRLIKMYEKVGPQLEGGMACGGVVGVVDVPYLVLEPTHNKQDFADAKEYRHLLRAMGEHLAQYWKDIAIAQRGIIKFWDEFGYLSANWNQPPSSELRYKRRRAMEIPTTIQCDLCLKWRTLPFQLSSVEKDYPDTWVCSMNPDPEQDRCEASEQKQKVPLGTFRKDMKTQEEKQKQLTEKIRQQQEKLEALQKTTPIRSQADLKKLPLEVTTRPSTEEPVRRPQRPRSPPLPAVIRNAPSRPPSLPTPRPASQPRKAPVISSTPKLPALAAREEASTSRLLQPPEAPRKPANTLVKTASRPAPLVQQLSPSLLPNSKSPREVPSPKVIKTPVVKKTESPIKLSPATPSRKRSVAVSDEEEVEEEAERRKERCKRGRFVVKEEKKDSNELSDSAGEEDSADLKRAQKDKGLHVEVRVNREWYTGRVTAVEVGKHVVRWKVKFDYVPTDTTPRDRWVEKGSEDVRLMKPPSPEHQSLDTQQEGGEEEVGPVAQQAIAVAEPSTSECLRIEPDTTALSTNHETIDLLVQILRNCLRYFLPPSFPISKKQLSAMNSDELISFPLKEYFKQYEVGLQNLCNSYQSRADSRAKASEESLRTSERKLRETEEKLQKLRTNIVALLQKVQEDIDINTDDELDAYIEDLITKGD

SEQ ID NO: 5063 - protein, 209 aa, Homo sapiens
MEQPRKAVVVTGFGPFGEHTVNASWIAVQELEKLGLGDSVDLHVYEIPVEYQTVQRLIPALWEKHSPQLVVHVGVSGMATTVTLEKCGHNKGYKGLDNCRFCPGSQCCVEDGPESIDSIIDMDAVCKRVTTLGLDVSVTISQDAGRYLCDFTYYTSLYQSHGRSAFVHVPPLGKPYNADQLGRALRAIIEEMLDLLEQSEGKINYCHKH

SEQ ID NO: 5064 - protein, 791 aa, Homo sapiens
MADDKVAILTDDEEEQKRKYVLADPFNGISREPEPPSNETPSSTETSAIPEEEIDWIEKHCVKINNDLLISKVFYFFFYSAYGSLYPLLPVYYKQLGMSPSQSGLLVGIRYFIEFCSAPFWGVVADRFKKGKIVLLFSLLCWVLFNLGIGFVKPATLRCVPKIRPTTHPTNASHQLTILPTNSSFTSFLTISPKMREKRNLLETGLNVSDTVTLPTAPNMNSEPTLQPQTGEITNRMMDLTLNSSTATPVSPGSVTKETTTVIVTTTKSLPSDQVMLVYDQQEVEAIFLVILVVVIIGEFFSASSVTIVDTVTLQYLGKHRDRYGLQRMWGSLGWGLAMLSVGIGIDYTHIEVLIDGKGCKPPEYRNYQIVFIVFGVLMTMALIVATQFRFRYNHFKNDDSKGKEVEIPQVERNNSTESSEETPTTTSHSQAFNFWDLIKLLCSVQYGSVLFVAWFMGFGYGFVFTFLYWHLEDLNGTTTLFGVCSVLSHVSELTAYFFSHKLIELIGHIRVLYIGLACNTARYIYISYLENAWTVLPMEVLQGVTHAAIWAACISYLSAAVPPELRTSAQGILQGLHLGLGRGCGAMIGGVLVNYFGAAATFRGIGMACLVILLLFALIQWLAVPDEEEDKTMLAERIPVPSSPVPIATIDLVQQQTEDVMPRIEPRLPPKKTKHQEEQEDVNKPAWGVSSSPWVTFVYALYQIKEMMQLTRDNRASEIQPLQGTNENRENSPAGRAQPVPCETHSDPSRNQPSPDAAASQTQTSPAHPSVDPCTEESEEQQAQLAAGGH

SEQ ID NO: 5065 - protein, 886 aa, Homo sapiens
MRPDCNSQKPSQALSIRDTSSKDPWPDIEPQLPATPAAVWGVFTFSWRGAGALGPRRGPRRLNNKRGAAKRQEDKTMSKGPGPGGSAASSAPPAATAQVLQAQPEKPQHYTYLKEFRTEQCPLFVQHKCTQHRPYTCFHWHFVNQRRRRSIRRRDGTFNYSPDVYCTKYDEATGLCPEGDECPFLHRTTGDTERRYHLRYYKTGICIHETDSKGNCTKNGLHCAFAHGPHDLRSPVYDIRELQAMEALQNGQTTVEGSIEGQSAGAASHAMIEKILSEEPRWQETAYVLGNYKTEPCKKPPRLCRQGYACPYYHNSKDRRRSPRKHKYRSSPCPNVKHGDEWGDPGKCENGDACQYCHTRTEQQFHPEIYKSTKCNDMQQSGSCPRGPFCAFAHVEQPPLSDDLQPSSAVSSPTQPGPVLYMPSAAGDSVPVSPSSPHAPDLSALLCRNSSLGSPSNLCGSPPGSIRKPPNLEGIVFPGESGLAPGSYKKAPGFEREDQVGAEYLKNFKCQAKLKPHSLEPRSQEQPLLQPKQDMLGILPAGSPLTSSISSSITSSLAATPPSPVGTSSVPGMNANALPFYPTSDTVESVIESALDDLDLNEFGVAALEKTFDNSTVPHPGSITIGGSLLQSSAPVNIPGSLGSSASFHSASPSPPVSLSSHFLQQPQGHLSQSENTFLGTSASHGSLGLNGMNSSIWEHFASGSFSPGTSPAFLSGPGAAELARLRQELDEANSTIKQWEESWKQAKQACDAWKKEAEEAGERASAAGAECELAREQRDALEVQVKKLQEELERLHAGPEPQALPAFSDLEALSLSTLYSLQKQLRAHLEQVDKAVFHMQSVKCLKCQEQKRAVLPCQHAALCELCAEGSECPICQPGRAHTLQS

SEQ ID NO: 5066 - protein, 886 aa, Homo sapiens; identical to SEQ ID NO: 5065

SEQ ID NO: 5067 - protein, 743 aa, Homo sapiens
MNNPSETSKPSMESGDGNTGTQTNGLDFQKQPVPVGGAISTAQAQAFLGHLHQVQLAGTSLQAAAQSLNVQSKSNEESGDSQQPSQPSQQPSVQAAIPQTQLMLAGGQITGLTLTPAQQQLLLQQAQAQAQLLAAAVQQHSASQQHSAAGATISASAATPMTQIPLSQPIQIAQDLQQLQQLQQQNLNLQQFVLVHPTTNLQPAQFIISQTPQGQQGLLQAQNLLTQLPQQSQANLLQSQPSITLTSQPATPTRTIAATPIQTLPQSQSTPKRIDTPSLEEPSDLEELEQFAKTFKQRRIKLGFTQGDVGLAMGKLYGNDFSQTTISRFEALNLSFKNMCKLKPLLEKWLNDAENLSSDSSLSSPSALNSPGIEGLSRRRKKRTSIETNIRVALEKSFLENQKPTSEEITMIADQLNMEKEVIRVWFCNRRQKEKRINPPSSGGTSSSPIKAIFPSPTSLVATTPSLVTSSAATTLTVSPVLPLTSAAVTNLSVTGTSDTTSNNTATVISTAPPASSAVTSPSLSPSPSASASTSEASSASETSTTQTTSTPLSSPLGTSQVMVTASGLQTAAAAALQGAAQLPANASLAAMAAAAGLNPSLMAPSQFAAGGALLSLNPGTLSGALSPALMSNSTLATIQALASGGSLPITSLDATGNLVFANAGGAPNIVTAPLFLNPQNLSLLTSNPVSLVSAAAASAGNSAPVASLHATSTSAESIQNSLFTVASASGAASTTTTASKAQ

SEQ ID NO: 5068 - protein, 254 aa, Homo sapiens
MSAELNVPIDPSAPACPEPGHKGMDYRDWVRRSYLELVTSNHHSVQALSWRKLYLSRAKLKASSRTSALLSGFAMVAMVEVQLETQYQYPRPLLIAFSACTTVLVAVHLFALLISTCILPNVEAVSNIHNLNSISESPHERMHPYIELAWGFSTVLGILLFLAEVVLLCWIKFLPVDARRQPGPPPGPGSHTGWQAALVSTIIMVPVGLIFVVFTIHFYRSLVRHKTERHNREIEELHKLKVQLDGHERSLQVL

SEQ ID NO: 5069 - protein, 79 aa, Homo sapiens
MELEAMSRYTSPVNPAVFPHLTVVLLAIGMFFTAWFFVYEVTSTKYTRDIYKELLISLVASLFMGFGVLFLLLWVGIYV

SEQ ID NO: 5070 - protein, 692 aa, Homo sapiens
MSSFEGQMAEYPTISIDRFDRENLRARAYFLSHCHKDHMKGLRAPTLKRRLECSLKVYLYCSPVTKELLLTSPKYRFWKKRIISIEIETPTQISLVDEASGEKEEIVVTLLPAGHCPGSVMFLFQGNNGTVLYTGDFRLAQGEAARMELLHSGGRVKDIQSVYLDTTFCDPRFYQIPSREECLSGVLELVRSWITRSPYHVVWLNCKAAYGYEYLFTNLSEELGVQVHVNKLDMFRNMPEILHHLTTDRNTQIHACRHPKAEEYFQWSKLPCGITSRNRIPLHIISIKPSTMWFGERSRKTNVIVRTGESSYRACFSFHSSYSEIKDFLSYLCPVNAYPNVIPVGTTMDKVVEILKPLCRSSQSTEPKYKPLGKLKRARTVHRDSEEEDDYLFDDPLPIPLRHKVPYPETFHPEVFSMTAVSEKQPEKLRQTPGCCRAECMQSSRFTNFVDCEESNSESEEEVGIPASLQGDLGSVLHLQKADGDVPQWEVFFKRNDEITDESLENFPSSTVAGGSQSPKLFSDSDGESTHISSQNSSQSTHITEQGSQGWDSQSDTVLLSSQERNSGDITSLDKADYRPTIKENIPASLMEQNVICPKDTYSDLKSRDKDVTIVPSTGEPTTLSSETHIPEEKSLLNLSTNADSQSSSDFEVPSTPEAELPKREHLQYLYEKLATGESIAVKKRKCSLLDT

SEQ ID NO: 5071 - protein, 572 aa, Homo sapiens
MFLFQGNNGTVLYTGDFRLAQGEAARMELLHSGGRVKDIQSVYLDTTFCDPRFYQIPSREECLSGVLELVRSWITRSPYHVVWLNCKAAYGYEYLFTNLSEELGVQVHVNKLDMFRNMPEILHHLTTDRNTQIHACRHPKAEEYFQWSKLPCGITSRNRIPLHIISIKPSTMWFGERSRKTNVIVRTGESSYRACFSFHSSYSEIKDFLSYLCPVNAYPNVIPVGTTMDKVVEILKPLCRSSQSTEPKYKPLGKLKRARTVHRDSEEEDDYLFDDPLPIPLRHKVPYPETFHPEVFSMTAVSEKQPEKLRQTPGCCRAECMQSSRFTNFVDCEESNSESEEEVGIPASLQGDLGSVLHLQKADGDVPQWEVFFKRNDEITDESLENFPSSTVAGGSQSPKLFSDSDGESTHISSQNSSQSTHITEQGSQGWDSQSDTVLLSSQERNSGDITSLDKADYRPTIKENIPASLMEQNVICPKDTYSDLKSRDKDVTIVPSTGEPTTLSSETHIPEEKSLLNLSTNADSQSSSDFEVPSTPEAELPKREHLQYLYEKLATGESIAVKKRKCSLLDT

SEQ ID NO: 5072 - protein, 572 aa, Homo sapiens; identical to SEQ ID NO: 5071

SEQ ID NO: 5073 - protein, 577 aa, Homo sapiens
MKHQERFLFQGNNGTVLYTGDFRLAQGEAARMELLHSGGRVKDIQSVYLDTTFCDPRFYQIPSREECLSGVLELVRSWITRSPYHVVWLNCKAAYGYEYLFTNLSEELGVQVHVNKLDMFRNMPEILHHLTTDRNTQIHACRHPKAEEYFQWSKLPCGITSRNRIPLHIISIKPSTMWFGERSRKTNVIVRTGESSYRACFSFHSSYSEIKDFLSYLCPVNAYPNVIPVGTTMDKVVEILKPLCRSSQSTEPKYKPLGKLKRARTVHRDSEEEDDYLFDDPLPIPLRHKVPYPETFHPEVFSMTAVSEKQPEKLRQTPGCCRAECMQSSRFTNFVDCEESNSESEEEVGIPASLQGDLGSVLHLQKADGDVPQWEVFFKRNDEITDESLENFPSSTVAGGSQSPKLFSDSDGESTHISSQNSSQSTHITEQGSQGWDSQSDTVLLSSQERNSGDITSLDKADYRPTIKENIPASLMEQNVICPKDTYSDLKSRDKDVTIVPSTGEPTTLSSETHIPEEKSLLNLSTNADSQSSSDFEVPSTPEAELPKREHLQYLYEKLATGESIAVKKRKCSLLDT

SEQ ID NO: 5074 - protein, 747 aa, Homo sapiens
MQGGEPVSTMKVSESEGKLEGQATAVTPNKNSSCGGGISSSSSSRGGSAKGWQYSDHMENVYGYLMKYTNLVTGWQYRFFVLNNEAGLLEYFVNEQSRNQKPRGTLQLAGAVISPSDEDSHTFTVNAASGEQYKLRATDAKERQHWVSRLQICTQHHTEAIGKNNPPLKSRSFSLASSSNSPISQRRPSQNAISFFNVGHSKLQSLSKRTNLPPDHLVEVREMMSHAEGQQRDLIRRIECLPTSGHLSSLDQDLLMLKATSMATMNCLNDCFHILQLQHASHQKGSLPSGTTIEWLEPKISLSNHYKNGADQPFATDQSKPVAVPEEQPVAESGLLAREPEEINADDEIEDTCDHKEDDLGAVEEQRSVILHLLSQLKLGMDLTRVVLPTFILEKRSLLEMYADFMSHPDLFIAITNGATAEDRMIRFVEYYLTSFHEGRKGAIAKKPYNPIIGETFHCSWKMPKSEVASSVFSSSSTQGVTNHAPLSGESLTQVGSDCYTVRFVAEQVSHHPPVSGFYAECTERKMCVNAHVWTKSKFLGMSIGVTMVGEGILSLLEHGEEYTFSLPCAYARSILTVPWVELGGKVSVNCAKTGYSASITFHTKPFYGGKLHRVTAEVKHNITNTVVCRVQGEWNSVLEFTYSNGETKYVDLTKLAVTKKRVRPLEKQDPFESRRLWKNVTDSLRESEIDKATEHKHTLEERQRTEERHRTETGTPWKTKYFIKEGDGWVYHKPLWKIIPTTQPAE

SEQ ID NO: 5075 - protein, 76 aa, Homo sapiens
MVCIPCIVIPVLLWIYKKFLEPYIYPLVSPFVSRIWPKKAIQESNDTNKGKVNFKGADMNGLPTKGPTEICDKKKD

SEQ ID NO: 5076 - protein, 319 aa, Homo sapiens
MLAARLVCLRTLPSRVFHPAFTKASPVVKNSITKNQWLLTPSREYATKTRIGIRRGRTGQELKEAALEPSMEKIFKIDQMGRWFVAGGAAVGLGALCYYGLGLSNEIGAIEKAVIWPQYVKDRIHSTYMYLAGSIGLTALSAIAISRTPVLMNFMMRGSWVTIGVTFAAMVGAGMLVRSIPYDQSPGPKHLAWLLHSGVMGAVVAPLTILGGPLLIRAAWYTAGIVGGLSTVAMCAPSEKFLNMGAPLGVGLGLVFVSSLGSMFLPPTTVAGATLYSVAMYGGLVLFSMFLLYDTQKVSSVQKYHQCMEFKNMIPLTRC

SEQ ID NO: 5077 - protein, 713 aa, Homo sapiens
MLCVGRLGGLGARAAALPPRRAGRGSLEAGIRARRVSTSWSPVGAAFNVKPQGSRLDLFGERARLFGVPELSAPEGFHIAQEKALRKTELLVDRACSTPPGPQTVLIFDELSDSLCRVADLADFVKIAHPEPAFREAAEEACRSIGTMVEKLNTNVDLYQSLQKLLADKKLVDSLDPETRRVAELFMFDFEISGIHLDKQKRKRAVDLNVKILDLSSTFLMGTNFPNKIEKHLLPEHIRRNFTSAGDHIIIDGLHAESPDDLVREAAYKIFLYPNAGQLKCLEELLSSRDLLAKLVGYSTFSHRALQGTIAKNPETVMQFLEKLSDKLSERTLKDFEMIRGMKMKLNAQNSEVMPWDPPYYSGVIRAERYNIEPSLYCPFFSLGACMEGLNILLNRLLGISLYAEQPAKGEVWSEDVRKLAVVHESEGLLGYIYCDFFQRADKPHQDCHFTIRGGRLKEDGDYQLPLVVLMLNLPRSSRSSPTLLTPGMMENLFHEMGHAMHSMLGRTRYQHVTGTRCPTDFAEVPSILMEYFANDYRVVNQFARHYQTGQPLPKNMVSRLCESKKVCAAADMQLQVFYATLDQIYHGKHPLRNSTTDILKETQEKFYGLPYVPNTAWQLRFSHLVGYGARYYSYLMSRAVASMVWKECFLQDPFNRAAGERYRREMLAHGGGREPMLMVEGMLQKCPSVDDFVSALVSDLDLDFETFLMDSE

SEQ ID NO: 5078 - protein, 249 aa, Homo sapiens
MAARRSQRRRGRRGEPGTALLVPLALGLGLALACLGLLLAVVSLGSRASLSAQEPAQEELVAEEDQDPSELNPQTEESQDPAPFLNRLVRPRRSAPKGRKTRARRAIAAHYEVHPRPGQDGAQAGVDGTVSGWEEARINSSSPLRYNRQIGEFIVTRAGLYYLYCQVHFDEGKAVYLKLDLLVDGVLALRCLEEFSATAASSLGPQLRLCQVSGLLALRPGSSLRIRTLPWAHLKAAPFLTYFGLFQVH

SEQ ID NO: 5079 - protein, 134 aa, Homo sapiens
MAARRSQRRRGRRGEPGTALLVPLALGLGLALACLGLLLAVVSLGSRASLSAQEPAQEELVAEEDQDPSELNPQTEESQDPAPFLNRLVRPRRSAPKGRKTRARRAIAAHYEVHPRPGQDGAQADGGYTTCLRP

SEQ ID NO: 5080 - protein, 62 aa, Homo sapiens
MAAATLTSKLYSLLFRRTSTFALTIIVGVMFFERAFDQGADAIYDHINEGVRACAIPDLGPA

SEQ ID NO: 5081 - protein, 63 aa, Homo sapiens
MAAATLTSKLYSLLFRRTSTFALTIIVGVMFFERAFDQGADAIYDHINEGKLWKHIKHKYENK

SEQ ID NO: 5082 - protein, 482 aa, Homo sapiens
MVMEKPSPLLVGREFVRQYYTLLNKAPEYLHRFYGRNSSYVHGGVDASGKPQEAVYGQNDIHHKVLSLNFSECHTKIRHVDAHATLSDGVVVQVMGLLSNSGQPERKFMQTFVLAPEGSVPNKFYVHNDMFRYEDEVFGDSEPELDEESEDEVEEEQEERQPSPEPVQENANSGYYEAHPVTNGIEEPLEESSHEPEPEPESETKTEELKPQVEEKNLEELEEKSTTPPPAEPVSLPQEPPKAFSWASVTSKNLPPSGTVSSSGIPPHVKAPVSQPRVEAKPEVQSQPPRVREQRPRERPGFPPRGPRPGRGDMEQNDSDNRRIIRYPDSHQLFVGNLPHDIDENELKEFFMSFGNVVELRINTKGVGGKLPNFGFVVFDDSEPVQRILIAKPIMFRGEVRLNVEEKKTRAARERETRGGGDDRRDIRRNDRGPGGPRGIVGGGMMRDRDGRGPPPRGGMAQKLGSGRGTGQMEGRFTGQRR

SEQ ID NO: 5083 - protein, 449 aa, Homo sapiens
MVMEKPSPLLVGREFVRQYYTLLNKAPEYLHRFYGRNSSYVHGGVDASGKPQEAVYGQNDIHHKVLSLNFSECHTKIRHVDAHATLSDGVVVQVMGLLSNSGQPERKFMQTFVLAPEGSVPNKFYVHNDMFRYEDEVFGDSEPELDEESEDEVEEEQEERQPSPEPVQENANSGYYEAHPVTNGIEEPLEESSHEPEPEPESETKTEELKPQVEEKNLEELEEKSTTPPPAEPVSLPQEPPKPRVEAKPEVQSQPPRVREQRPRERPGFPPRGPRPGRGDMEQNDSDNRRIIRYPDSHQLFVGNLPHDIDENELKEFFMSFGNVVELRINTKGVGGKLPNFGFVVFDDSEPVQRILIAKPIMFRGEVRLNVEEKKTRAARERETRGGGDDRRDIRRNDRGPGGPRGIVGGGMMRDRDGRGPPPRGGMAQKLGSGRGTGQMEGRFTGQRR

SEQ ID NO: 5084 - protein, 482 aa, Homo sapiens; identical to SEQ ID NO: 5082

SEQ ID NO: 5085 - protein, 697 aa, Homo sapiens
MGPDRKEVPLSRGTQAVVVGKGRGAPGDDSSMGGRPSSPLDKQQRQHLRGQVDTLLRNFLPCYRGQLAASVLRQISRELGPQEPTGSQLLRSKKLPRVREHRGPLTQLRGHPPRWQPIFCVLRGDGRLEWFSHKEEYENGGHCLGSTALTGYTLLTSQREYLRLLDALCPESLGDHTQEEPDSLLEVPVSFPLFLQHPFRRHLCFSAATREAQHAWRLALQGGIRLQGTVLQRSQAPAARAFLDAVRLYRQHQGHFGDDDVTLGSDAEVLTAVLMREQLPALRAQTLPGLRGAGRARAWAWTELLDAVHAAVLAGASAGLCAFQPEKDELLASLEKTIRPDVDQLLRQRARVAGRLRTDIRGPLESCLRREVDPQLPRVVQTLLRTVEASLEAVRTLLAQGMDRLSHRLRQSPSGTRLRREVYSFGEMPWDLALMQTCYREAERSRGRLGQLAAPFGFLGMQSLVFGAQDLAQQLMADAVATFLQLADQCLTTALNCDQAAQRLERVRGRVLKKFKSDSGLAQRRFIRGWGLCIFLPFVLSQLEPGCKKELPEFEGDVLAVGSQALTTEGIYEDVIRGCLLQRIDQELKKTLGANDVSCTLDGCLEVPWEQEGAAPNLNLVSSFLAGRQAFTDFLCLPAKSSANWILAASLLSCSCFRSGFHRDSRVFLVQLAEGLSHSLETVSSHSVWSFRPTPRQ

SEQ ID NO: 5086 - protein, 314 aa, Homo sapiens
MEGVELKEEWQDEDFPIPLPEDDSIEADILAITGPEDQPGSLEVNGNKVRKKLMAPDISLTLDPSDGSVLSDDLDESGEIDLDGLDTPSENSNEFEWEDDLPKPKTTEVIRKGSITEYTAAEEKEDGRRWRMFRIGEQDHRVDMKAIEPYKKVISHGGYYGDGLNAIVVFAVCFMPESSQPNYRYLMDNLFKYVIGTLELLVAENYMIVYLNGATTRRKMPSLGWLRKCYQQIDRRLRKNLKSLIIVHPSWFIRTLLAVTRPFISSKFSQKIRYVFNLAELAELVPMEYVGIPECIKQVDQELNGKQDEPKNEQ

SEQ ID NO: 5087 - protein, 116 aa, Homo sapiens
MSATAATAPPAAPAGEGGPPAPPPNLTSNRRLQQTQAQVDEVVDIMRVNVDKVLERDQKLSELDDRADALQAGASQFETSAAKLKRKYWWKNLKMMIILGVICAIILIIIIVYFSS

SEQ ID NO: 5088 - protein, 2671 aa, Homo sapiens
MAADTQVSETLKRFAGKVTTASVKERREILSELGKCVAGKDLPEGAVKGLCKLFCLTLHRYRDAASRRALQAAIQQLAEAQPEATAKNLLHSLQSSGIGSKAGVPSKSSGSAALLALTWTCLLVRIVFPSRAKRQGDIWNKLVEVQCLLLLEVLGGSHKHAVDGAVKKLTKLWKENPGLVEQYLSAILSLEPNQNYAGMLGLLVQFCTSHKEMDVVSQHKSALLDFYMKNILMSKVKPPKYLLDSCAPLLRYLSHSEFKDLILPTIQKSLLRSPENVIETISSLLASVTLDLSQYAMDIVKGLAGHLKSNSPRLMDEAVLALRNLARQCSDSSAMESLTKHLFAILGGSEGKLTVVAQKMSVLSGIGSVSHHVVSGPSSQVLNGIVAELFIPFLQQEVHEGTLVHAVSVLALWCNRFTMEVPKKLTEWFKKAFSLKTSTSAVRHAYLQCMLASYRGDTLLQALDLLPLLIQTVEKAASQSTQVPTITEGVAAALLLLKLSVADSQAEAKLSSFWQLIVDEKKQVFTSEKFLVMASEDALCTVLHLTERLFLDHPHRLTGNKVQQYHRALVAVLLSRTWHVRRQAQQTVRKLLSSLGGFKLAHGLLEELKTVLSSHKVLPLEALVTDAGEVTEAGKAYVPPRVLQEALCVISGVPGLKGDVTDTEQLAQEMLIISHHPSLVAVQSGLWPALLARMKIDPEAFITRHLDQIIPRMTTQSPLNQSSMNAMGSLSVLSPDRVLPQLISTITASVQNPALRLVTREEFAIMQTPAGELYDKSIIQSAQQDSIKKANMKRENKAYSFKEQIIELELKEEIKKKKGIKEEVQLTSKQKEMLQAQLDREAQVRRRLQELDGELEAALGLLDIILAKNPSGLTQYIPVLVDSFLPLLKSPLAAPRIKNPFLSLAACVMPSRLKALGTLVSHVTLRLLKPECVLDKSWCQEELSVAVKRAVMLLHTHTITSRVGKGEPGAAPLSAPAFSLVFPFLKMVLTEMPHHSEEEEEWMAQILQILTVQAQLRASPNTPPGRVDENGPELLPRVAMLRLLTWVIGTGSPRLQVLASDTLTTLCASSSGDDGCAFAEQEEVDVLLCALQSPCASVRETVLRGLMELHMVLPAPDTDEKNGLNLLRRLWVVKFDKEEEIRKLAERLWSMMGLDLQPDLCSLLIDDVIYHEAAVRQAGAEALSQAVARYQRQAAEVMGRLMEIYQEKLYRPPPVLDALGRVISESPPDQWEARCGLALALNKLSQYLDSSQVKPLFQFFVPDALNDRHPDVRKCMLDAALATLNTHGKENVNSLLPVFEEFLKNAPNDASYDAVRQSVVVLMGSLAKHLDKSDPKVKPIVAKLIAALSTPSQQVQESVASCLPPLVPAIKEDAGGMIQRLMQQLLESDKYAERKGAAYGLAGLVKGLGILSLKQQEMMAALTDAIQDKKNFRRREGALFAFEMLCTMLGKLFEPYVVHVLPHLLLCFGDGNQYVREAADDCAKAVMSNLSAHGVKLVLPSLLAALEEESWRTKAGSVELLGAMAYCAPKQLSSCLPNIVPKLTEVLTDSHVKVQKAGQQALRQIGSVIRNPEILAIAPVLLDALTDPSRKTQKCLQTLLDTKFVHFIDAPSLALIMPIVQRAFQDRSTDTRKMAAQIIGNMYSLTDQKDLAPYLPSVTPGLKASLLDPVPEVRTVSAKALGAMVKGMGESCFEDLLPWLMETLTYEQSSVDRSGAAQGLAEVMAGLGVEKLEKLMPEIVATASKVDIAPHVRDGYIMMFNYLPITFGDKFTPYVGPIIPCILKALADENEFVRDTALRAGQRVISMYAETAIALLLPQLEQGLFDDLWRIRFSSVQLLGDLLFHISGVTGKMTTETASEDDNFGTAQSNKAIITALGVERRNRVLAGLYMGRSDTQLVVRQASLHVWKIVVSNTPRTLREILPTLFGLLLGFLASTCADKRTIAARTLGDLVRKLGEKILPEIIPILEEGLRSQKSDERQGVCIGLSEIMKSTSRDAVLYFSESLVPTARKALCDPLEEVREAAAKTFEQLHSTIGHQALEDILPFLLKQLDDEEVSEFALDGLKQVMAIKSRVVLPYLVPKLTTPPVNTRVLAFLSSVAGDALTRHLGVILPAVMLALKEKLGTPDEQLEMANCQAVILSVEDDTGHRIIIEDLLEATRSPEVGMRQAAAIILNIYCSRSKADYTSHLRSLVSGLIRLFNDSSPVVLEESWDALNAITKKLDAGNQLALIEELHKEIRLIGNESKGEHVPGFCLPKKGVTSILPVLREGVLTGSPEQKEEAAKALGLVIRLTSADALRPSVVSITGPLIRILGDRFSWNVKAALLETLSLLLAKVGIALKPFLPQLQTTFTKALQDSNRGVRLKAADALGKLISIHIKVDPLFTELLNGIRAMEDPGVRDTMLQALRFVIQGAGAKVDAVIRKNIVSLLLSMLGHDEDNTRISSAGCLGELCAFLTEEELSAVLQQCLLADVSGIDWMVRHGRSLALSVAVNVAPGRLCAGRYSSDVQEMILSSATADRIPIAVSGVRGMGFLMRHHIETGGGQLPAKLSSLFVKCLQNPSSDIRLVAEKMIWWANKDPLPPLDPQAIKPILKALLDNTKDKNTVVRAYSDQAIVNLLKMRQGEEVFQSLSKILDVASLEVLNEVNRRSLKKLASQADSTEQVDDTILT

SEQ ID NO: 5089 - protein, 634 aa, Homo sapiens
MPSDLAKKKAAKKKEAAKARQRPRKGHEENGDVVTEPQVAEKNEANGRETTEVDLLTKELEDFEMKKAAARAVTGVLASHPNSTDVHIINLSLTFHGQELLSDTKLELNSGRRYGLIGLNGIGKSMLLSAIGKREVPIPEHIDIYHLTREMPPSDKTPLHCVMEVDTERAMLEKEAERLAHEDAECEKLMELYERLEELDADKAEMRASRILHGLGFTPAMQRKKLKDFSGGWRMRVALARALFIRPFMLLLDEPTNHLDLDACVWLEEELKTFKRILVLVSHSQDFLNGVCTNIIHMHNKKLKYYTGNYDQYVKTRLELEENQMKRFHWEQDQIAHMKNYIARFGHGSAKLARQAQSKEKTLQKMMASGLTERVVSDKTLSFYFPPCGKIPPPVIMVQNVSFKYTKDGPCIYNNLEFGIDLDTRVALVGPNGAGKSTLLKLLTGELLPTDGMIRKHSHVKIGRYHQHLQEQLDLDLSPLEYMMKCYPEIKEKEEMRKIIGRYGLTGKQQVSPIRNLSDGQKCRVCLAWLAWQNPHMLFLDEPTNHLDIETIDALADAINEFEGGMMLVSHDFRLIQQVAQEIWVCEKQTITKWPGDILAYKEHLKSKLVDEEPQLTKRTHNVCTLTLASLPRP

SEQ ID NO: 5090 - protein, 623 aa, Homo sapiens
MPSDLAKKKAAKKKEAAKARQRPRKGHEENGDVVTEPQVAEKNEANGRETTEVDLLTKELEDFEMKKAAARAVTGVLASHPNSTDVHIINLSLTFHGQELLSDTKLELNSGRRYGLIGLNGIGKSMLLSAIGKREVPIPEHIDIYHLTREMPPSDKTPLHCVMEVDTERAMLEKEAERLAHEDAECEKLMELYERLEELDADKAEMRASRILHGLGFTPAMQRKKLKDFSGGWRMRVALARALFIRPFMLLLDEPTNHLDLDACVWLEEELKTFKRILVLVSHSQDFLNGVCTNIIHMHNKKLKYYTGNYDQYVKTRLELEENQMKRFHWEQDQIAHMKNYIARFGHGSAKLARQAQSKEKTLQKMMASGLTERVVSDKTLSFYFPPCGKIPPPVIMVQNVSFKYTKDGPCIYNNLEFGIDLDTRVALVGPNGAGKSTLLKLLTGELLPTDGMIRKHSHVKIGRYHQHLQEQLDLDLSPLEYMMKCYPEIKEKEEMRKIIGRYGLTGKQQVSPIRNLSDGQKCRVCLAWLAWQNPHMLFLDEPTNHLDIETIDALADAINEFEGGMMLVSHDFRLIQQVAQEIWVCEKQTITKWPGDILAYKEHLKSKLVDEEPQLTKRTHNV

SEQ ID NO: 5091 - protein, 323 aa, Homo sapiens
MAAELSMGPELPTSPLAMEYVNDFDLLKFDVKKEPLGRAERPGRPCTRLQPAGSVSSTPLSTPCSSVPSSPSFSPTEQKTHLEDLYWMASNYQQMNPEALNLTPEDAVEALIGSHPVPQPLQSFDSFRGAHHHHHHHHPHPHHAYPGAGVAHDELGPHAHPHHHHHHQASPPPSSAASPAQQLPTSHPGPGPHATASATAAGGNGSVEDRFSDDQLVSMSVRELNRHLRGFTKDEVIRLKQKRRTLKNRGYAQSCRYKRVQQKHHLENEKTQLIQQVEQLKQEVSRLARERDAYKVKCEKLANSGFREAGSTSDSPSSPEFFL

SEQ ID NO: 5092 - protein, 472 aa, Homo sapiens
MAGPGWGPPRLDGFILTERLGSGTYATVYKAYAKKDTREVVAIKCVAKKSLNKASVENLLTEIEILKGIRHPHIVQLKDFQWDSDNIYLIMEFCAGGDLSRFIHTRRILPEKVARVFMQQLASALQFLHERNISHLDLKPQNILLSSLEKPHLKLADFGFAQHMSPWDEKHVLRGSPLYMAPEMVCQRQYDARVDLWSMGVILYEALFGQPPFASRSFSELEEKIRSNRVIELPLRPLLSRDCRDLLQRLLERDPSRRISFQDFFAHPWVDLEHMPSGESLGRATALVVQAVKKDQEGDSAAALSLYCKALDFFVPALHYEVDAQRKEAIKAKVGQYVSRAEELKAIVSSSNQALLRQGTSARDLLREMARDKPRLLAALEVASAAMAKEEAAGGEQDALDLYQHSLGELLLLLAAEPPGRRRELLHTEVQNLMARAEYLKEQVKMRESRWEADTLDKEGLSESVRSSCTLQ

SEQ ID NO: 5093 - protein, 476 aa, Homo sapiens
MSGPTWLPPKQPEPARAPQGRAIPRGTPGPPPAHGAALQPHPRVNFCPLPSEQCYQAPGGPEDRGPAWVGSHGVLQHTQGLPADRGGLRPGSLDAEIDLLSSTLAELNGGRGHASRRPDRQAYEPPPPPAYRTGSLKPNPASPLPASPYGGPTPASYTTASTPAGPAFPVQVKVAQPVRGCGPPRRGASQASGPLPGPHFPLPGRGEVWGPGYRSQREPGPGAKEEAAGVSGPAGRGRGGEHGPQVPLSQPPEDELDRLTKKLVHDMNHPPSGEYFGQCGGCGEDVVGDGAGVVAFDRVFHVGCFVCSTCRAQLRGQHFYAVERRAYCEGCYVATLEKCATCSQPILDRILRAMGKAYHPGCFTCVVCHRGLDGIPFTVDATSQIHCIEDFHRKFAPRCSVCGGAIMPEPGQEETVRIVALDRSFHIGCYKCEECGLLLSSEGECQGCYPLDGHILCKACSAWRIQELSATVTTDC

SEQ ID NO: 5094 - protein, 1100 aa, Homo sapiens
MGNAAGSAEQPAGPAAPPPKQPAPPKQPMPAAGELEERFNRALNCMNLPPDKVQLLSQYDNEKKWELICDQERFQVKNPPAAYIQKLKSYVDTGGVSRKVAADWMSNLGFKRRVQESTQVLRELETSLRTNHIGWVQEFLNEENRGLDVLLEYLAFAQCSVTYDMESTDNGASNSEKNKPLEQSVEDLSKGPPSSVPKSRHLTIKLTPAHSRKALRNSRIVSQKDDVHVCIMCLRAIMNYQSGFSLVMNHPACVNEIALSLNNKNPRTKALVLELLAAVCLVRGGHDIILAAFDNFKEVCGEQHRFEKLMEYFRNEDSNIDFMVACMQFINIVVHSVENMNFRVFLQYEFTHLGLDLYLERLRLTESDKLQVQIQAYLDNIFDVGALLEDTETKNAVLEHMEELQEQVALLTERLRDAENESMAKIAELEKQLSQARKELETLRERFSESTAMGASRRPPEPEKAPPAAPTRPSALELKVEELEEKGLIRILRGPGDAVSIEILPVAVATPSGGDAPTPGVPTGSPSPDLAPAAEPAPGAAPPPPPPLPGLPSPQEAPPSAPPQAPPLPGSPEPPPAPPLPGDLPPPPPPPPPPPGTDGPVPPPPPPPPPPPGGPPDALGRRDSELGPGVKAKKPIQTKFRMPLLNWVALKPSQITGTVFTELNDEKVLQELDMSDFEEQFKTKSQGPSLDLSALKSKAAQKAPSKATLIEANRAKNLAITLRKGNLGAERICQAIEAYDLQALGLDFLELLMRFLPTEYERSLITRFEREQRPMEELSEEDRFMLCFSRIPRLPERMTTLTFLGNFPDTAQLLMPQLNAIIAASMSIKSSDKLRQILEIVLAFGNYMNSSKRGAAYGFRLQSLDALLEMKSTDRKQTLLHYLVKVIAEKYPQLTGFHSDLHFLDKAGSVSLDSVLADVRSLQRGLELTQREFVRQDDCMVLKEFLRANSPTMDKLLADSKTAQEAFESVVEYFGENPKTTSPGLFFSLFSRFIKAYKKAEQEVEQWKKEAAAQEAGADTPGKGEPPAPKSPPKARRPQMDLISELKRRQQKEPLIYESDRDGAIEDIITVIKTVPFTARTGKRTSRLLCEASLGEEMPL

SEQ ID NO: 5095 - protein, 97 aa, Homo sapiens
MSANGAVWGRVRSRLRAFPERLAACGAEAAAYGRCVQASTAPGGRLSKDFCAREFEALRSCFAAAVGGRGPLPPFPALPLQEPAGPGFPLLSRWFKV

SEQ ID NO: 5096 - protein, 74 aa, Homo sapiens
MSANGAVWGRVRSRLRAFPERLAACGAEAAAYGRCVQASTAPGGRLSKDFCAREFEALRSCFAAAAKKTLEGGC

SEQ ID NO: 5097 - protein, 74 aa, Homo sapiens; identical to SEQ ID NO: 5096

SEQ ID NO: 5098 - protein, 74 aa, Homo sapiens; identical to SEQ ID NO: 5096

SEQ ID NO: 5099 - protein, 97 aa, Homo sapiens; identical to SEQ ID NO: 5095

SEQ ID NO: 5100 - protein, 359 aa, Homo sapiens
MSLQRLLQHSSNGNLADFCAGPAYSSYSTLTGSLTMDDNRRIQMLADTVATLPRGRKQLALTRSSSLSDFSWSQRKLVTVEKQDNETFGFEIQSYRPQNQNACSSEMFTLICKIQEDSPAHCAGLQAGDVLANINGVSTEGFTYKQVVDLIRSSGNLLTIETLNGTMILKRTELEAKLQVLKQTLKQKWVEYRSLQLQEHRLLHGDAANCPSLENMDLDELSLFGPLPGPGPALVDRNRLSSESSCKSWLSSMTMDSEDGYQTCVSEDSSRGAFSRQTSTDDECFIPKEGDDFLRRSSSRRNRSISNTSSGSMSPLWEGNLSSMFGTLPRKSRKGSVRKQLLKFIPGLHRAVEEEESRF

SEQ ID NO: 5101 - protein, 575 aa, Homo sapiens
MSHAAEPARDGVEASAEGPRAVFVLLEERRPADSAQLLSLNSLLPESGIVADIELENVLDPDSFYELKSQPLPLRSSLPISLQATPATPATLSASSSAGGSRTPAMSSSSSSRVLLRQQLMRAQAQEQERRERREQAAAAPFPSPAPASPAISVVGVSAGGHTLSRPPPAQVPREVLKVQTHLENPTRYHLQQARRQQVKQYLSTTLGPKLASQALTPPPGPASAQPLPAPEAAHTTGPTGSAPNSPMALLTIGSSSEKEIDDVIDEIISLESSYNDEMLSYLPGGTTGLQLPSTLPVSGNLLDVYSSQGVATPAITVSNSCPAELPNIKREISETEAKALLKERQKKDNHNLIERRRRFNINDRIKELGTLIPKSSDPEMRWNKGTILKASVDYIRKLQKEQQRSKDLESRQRSLEQANRSLQLRIQELELQAQIHGLPVPPTPGLLSLATTSASDSLKPEQLDIEEEGRPGAATFHVGGGPAQNAPHQQPPAPPSDALLDLHFPSDHLGDLGDPFHLGLEDILMEEEEGVVGGLSGGALSPLRAASDPLLSSVSPAVSKASSRRSSFSMEEES

SEQ ID NO: 5102 - protein, 630 aa, Homo sapiens
MAAVAMTPNPVQTLQEEAVCAICLDYFTDPVSIGCGHNFCRVCVTQLWGGEDEEDRDELDREEEEEDGEEEEVEAVGAGAGWDTPMRDEDYEGDMEEEVEEEEEGVFWTSGMSRSSWDNMDYVWEEEDEEEDLDYYLGDMEEEDLRGEDEEDEEEVLEEVEEEDLDPVTPLPPPPAPRRCFTCPQCRKSFPRRSFRPNLQLANMVQVIRQMHPTPGRGSRVTDQGICPKHQEALKLFCEVDEEAICVVCRESRSHKQHSVVPLEEVVQEYKAKLQGHVEPLRKHLEAVQKMKAKEERRVTELKSQMKSELAAVASEFGRLTRFLAEEQAGLERRLREMHEAQLGRAGAAASRLAEQAAQLSRLLAEAQERSQQGGLRLLQDIKETFNRCEEVQLQPPEVWSPDPCQPHSHDFLTDAIVRKMSRMFCQAARVDLTLDPDTAHPALMLSPDRRGVRLAERRQEVADHPKRFSADCCVLGAQGFRSGRHYWEVEVGGRRGWAVGAARESTHHKEKVGPGGSSVGSGDASSSRHHHRRRRLHLPQQPLLQREVWCVGTNGKRYQAQSSTEQTLLSPSEKPRRFGVYLDYEAGRLGFYNAETLAHVHTFSAAFLGERVFPFFRVLSKGTRIKLCP

SEQ ID NO: 5103 - protein, 518 aa, Homo sapiens
MAAVAMTPNPVQTLQEEAVCAICLDYFTDPVSIGCGHNFCRVCVTQLWGGEDEEDRDELDREEEEEDGEEEEVEAVGAGAGWDTPMRDEDYEGDMEEEVEEEEEGVFWTSGMSRSSWDNMDYVWEEEDEEEDLDYYLGDMEEEDLRGEDEEDEEEVLEEVEEEDLDPVTPLPPPPAPRRCFTCPQCRKSFPRRSFRPNLQLANMVQVIRQMHPTPGRGSRVTDQGICPKHQEALKLFCEVDEEAICVVCRESRSHKQHSVVPLEEVVQEYKAKLQGHVEPLRKHLEAVQKMKAKEERRVTELKSQMKSELAAVASEFGRLTRFLAEEQAGLERRLREMHEAQLGRAGAAASRLAEQAAQLSRLLAEAQERSQQGGLRLLQDIKETFNRCEEVQLQPPEVWSPDPCQPHSHDFLTDAIVRKMSRMFCQAARVDLTLDPDTAHPALMLSPDRRGVRLAERRQEVADHPKRFSADCCVLGAQGFRSGRHYWEEPKEPSWPPAQPSLTYYVCPTDRPEFSFT

SEQ ID NO: 5104 - protein, 323 aa, Homo sapiens
MAAAALPAWLSLQSRARTLRAFSTAVYSATPVPTPSLPERTPGNERPPRRKALPPRTEKMAVDQDWPSVYPVAAPFKPSAVPLPVRMGYPVKKGVPMAKEGNLELLKIPNFLHLTPVAIKKHCEALKDFCTEWPAALDSDEKCEKHFPIEIDSTDYVSSGPSVRNPRARVVVLRVKLSSLNLDDHAKKKLIKLVGERYCKTTDVLTIKTDRCPLRRQNYDYAVYLLTVLYHESWNTEEWEKSKTEADMEEYIWENSSSERNILETLLQMKAAEKNMEINKEELLGTKEIEEYKKSVVSLKNEEENENSISQYKESVKRLLNVT

SEQ ID NO: 5105 - protein, 80 aa, Homo sapiens
MCLISLCVSFTSVNKREQNKPKILILLKKRLSGCFIKEARGTRLKGNQLAVTKARDDGGLAEDGDSGGGKVIRFWIYFEG

SEQ ID NO: 5106 - protein, 1025 aa, Homo sapiens
MVAMAEAEAGVAVEVRGLPPAVPDELLTLYFENRRRSGGGPVLSWQRLGCGGVLTFREPADAERVLAQADHELHGAQLSLRPAPPRAPARLLLQGLPPGTTPQRLEQHVQALLRASGLPVQPCCALASPRPDRALVQLPKPLSEADVRVLEEQAQNLGLEGTLVSLARVPQARAVRVVGDGASVDLLLLELYLENERRSGGGPLEDLQRLPGPLGTVASFQQWQVAERVLQQEHRLQGSELSLVPHYDVLEPEELAENTSGGDHPSTQGPRATKHALLRTGGLVTALQGAGTVTMGSGEEPGQSGASLRTGPIVQGRGIMTTGSGQEPGQSGTSLRTGPMGSLGQAEQVSSMPMGSLEHEGLVSLRPVGLQEQEGPMSLGPVGSAGPVETSKGLPGQEGLVEIAMDSPEQEGLVGPMEITMGSLEKAGPVSPGCVKLAGQEGLVEMVLLMEPGAMRFLQLYHEDLLAGLGDVALLPLEGPDMTGFRLCGAQASCQAAEEFLRSLLGSISCHVLCLEHSGSARFLLGPEGQHLLQGLEAQFQCVFGTERLATATLDTGLEEVDPTEALPVLPGNAHTLWTPDSTGGDQEDVSLEEVRELLATLEGLDLDGEDWLPRELEEEGPQEQPEEEATPGHEEEEPVAPSTVAPRWLEEEAALQLALHRSLEPQGQVAEQEEAAALRQALTLSLLEQPPLEAEEPPDGGTDGKAQLVVHSAFEQDVEELDRALRAALEVHVQEETVGPWRRTLPAELRARLERCHGVSVALRGDCTILRGFGAHPARAARHLVALLAGPWDQSLAFPLAASGPTLAGQTLKGPWNNLERLAENTGEFQEVVRAFYDTLDAARSSIRVVRVERVSHPLLQQQYELYRERLLQRCERRPVEQVLYHGTTAPAVPDICAHGFNRSFCGRNATVYGKGVYFAKRASLSVQDRYSPPNADGHKAVFVARVLTGDYGQGRRGLRAPPLRGPGHVLLRYDSAVDCICQPSIFVIFHDTQALPTHLITCEHVPRASPDDPSGLPGRSPDT

SEQ ID NO: 5107 - protein, 1170 aa, Homo sapiens
MKDSCITVMAMALLSGFFFFAPASSYNLDVRGARSFSPPRAGRHFGYRVLQVGNGVIVGAPGEGNSTGSLYQCQSGTGHCLPVTLRGSNYTSKYLGMTLATDPTDGSILACDPGLSRTCDQNTYLSGLCYLFRQNLQGPMLQGRPGFQECIKGNVDLVFLFDGSMSLQPDEFQKILDFMKDVMKKLSNTSYQFAAVQFSTSYKTEFDFSDYVKWKDPDALLKHVKHMLLLTNTFGAINYVATEVFREELGARPDATKVLIIITDGEATDSGNIDAAKDIIRYIIGIGKHFQTKESQETLHKFASKPASEFVKILDTFEKLKDLFTELQKKIYVIEGTSKQDLTSFNMELSSSGISADLSRGHAVVGAVGAKDWAGGFLDLKADLQDDTFIGNEPLTPEVRAGYLGYTVTWLPSRQKTSLLASGAPRYQHMGRVLLFQEPQGGGHWSQVQTIHGTQIGSYFGGELCGVDVDQDGETELLLIGAPLFYGEQRGGRVFIYQRRQLGFEEVSELQGDPGYPLGRFGEAITALTDINGDGLVDVAVGAPLEEQGAVYIFNGRHGGLSPQPSQRIEGTQVLSGIQWFGRSIHGVKDLEGDGLADVAVGAESQMIVLSSRPVVDMVTLMSFSPAEIPVHEVECSYSTSNKMKEGVNITICFQIKSLYPQFQGRLVANLTYTLQLDGHRTRRRGLFPGGRHELRRNIAVTTSMSCTDFSFHFPVCVQDLISPINVSLNFSLWEEEGTPRDQRAQGKDIPPILRPSLHSETWEIPFEKNCGEDKKCEANLRVSFSPARSRALRLTAFASLSVELSLSNLEEDAYWVQLDLHFPPGLSFRKVEMLKPHSQIPVSCEELPEESRLLSRALSCNVSSPIFKAGHSVALQMMFNTLVNSSWGDSVELHANVTCNNEDSDLLEDNSATTIIPILYPINILIQDQEDSTLYVSFTPKGPKIHQVKHMYQVRIQPSIHDHNIPTLEAVVGVPQPPSEGPITHQWSVQMEPPVPCHYEDLERLPDAAEPCLPGALFRCPVVFRQEILVQVIGTLELVGEIEASSMFSLCSSLSISFNSSKHFHLYGSNASLAQVVMKVDVVYEKQMLYLYVLSGIGGLLLLLLIFIVLYKVGFFKRNLKEKMEAGRGVPNGIPAEDSEQLASGQEAGDPGCLKPLHEKDSESGGGKD

SEQ ID NO: 5108 - protein, 2025 aa, Homo sapiens
MDNFAEGDFTVADYALLEDCPHVDDCVFAAEFMSNDYVRVTQLYCDGVGVQYKDYIQSERNLEFDICSIWCSKPISVLQDYCDAIKINIFWPLLFQHQNSSVISRLHPCVDANNSRASEINLKKLQHLELMEDIVDLAKKVANDSFLIGGLLRIGCKIENKILAMEEALNWIKYAGDVTILTKLGSIDNCWPMLSIFFTEYKYHITKIVMEDCNLLEELKTQSCMDCIEEGELMKMKGNEEFSKERFDIAIIYYTRAIEYRPENYLLYGNRALCFLRTGQFRNALGDGKRATILKNTWPKGHYRYCDALSMLGEYDWALQANIKAQKLCKNDPEGIKDLIQQHVKLQKQIEDLQGRTANKDPIKAFYENRAYTPRSLSAPIFTTSLNFVEKERDFRKINHEMANGGNQNLKVADEALKVDDCDCHPEFSPPSSQPPKHKGKQKSRNNESEKFSSSSPLTLPADLKNILEKQFSKSSRAAHQDFANIMKMLRSLIQDGYMALLEQRCRSAAQAFTELLNGLDPQKIKQLNLAMINYVLVVYGLAISLLGIGQPEELSEAENQFKRIIEHYPSEGLDCLAYCGIGKVYLKKNRFLEALNHFEKARTLIYRLPGVLTWPTSNVIIEESQPQKIKMLLEKFVEECKFPPVPDAICCYQKCHGYSKIQIYITDPDFKGFIRISCCQYCKIEFHMNCWKKLKTTTFNDKIDKDFLQGICLTPDCEGVISKIIIFSSGGEVKCEFEHKVIKEKVPPRPILKQKCSSLEKLRLKEDKKLKRKIQKKEAKKLAQERMEEDLRESNPPKNEEQKETVDNVQRCQFLDDRILQCIKQYADKIKSGIQNTAMLLKELLSWKVLSTEDYTTCFSSRNFLNEAVDYVIRHLIQENNRVKTRIFLHVLSELKEVEPKLAAWIQKLNSFGLDATGTFFSRYGASLKLLDFSIMTFLWNEKYGHKLDSIEGKQLDYFSEPASLKEARCLIWLLEEHRDKFPALHSALDEFFDIMDSRCTVLRKQDSGEAPFSSTKVKNKSKKKKPKDSKPMLVGSGTTSVTSNNEIITSSEDHSNRNSDSAGPFAVPDHLRQDVEEFEALYDQHSNEYVVRNKKLWDMNPKQKCSTLYDYFSQFLEEHGPLDMSNKMFSAEYEFFPEETRQILEKAGGLKPFLLGCPRFVVIDNCIALKKVASRLKKKRKKKNIKTKVEEISKAGEYVRVKLQLNPAAREFKPDVKSKPVSDSSSAPAFENVKPKPVSANSPKPACEDVKAKPVSDNSSRQVSEDGQPKGVSSNSPKPGSEDANYKRVSCNSPKPVLEDVKPTYWAQSHLVTGYCTYLPFQRFDITQTPPAYINVLPGLPQYTSIYTPLASLSPEYQLPRSVPVVPSFVANDRADKNAAAYFEGHHLNAENVAGHQIASETQILEGSLGISVKSHCSTGDAHTVLSESNRNDEHCGNSNNKCEVIPESTSAVTNIPHVQMVAIQVSWNIIHQEVNTEPYNPFEERQGEISRIEKEHQVLQDQLQEVYENYEQIKLKGLEETRDLEEKLKRHLEENKISKTELDWFLQDLEREIKKWQQEKKEIQERLKSLKKKIKKVSNASEMYTQKNDGKEKEHELHLDQSLEISNTLTNEKMKIEEYIKKGKEDYEESHQRAVAAEVSVLENWKESEVYKLQIMESQAEAFLKKLGLISRDPAAYPDMESDIRSWELFLSNVTKEIEKAKSQFEEQIKAIKNGSRLSELSKVQISELSFPACNTVHPELLPESSGDDGQGLVTSASDVTGNHAALHRDPSVFSAGDSPGEAPSALLPGPPPGQPEATQLTGPKRAGQAALSERSPVADRKQPVPPGRAARSSQSPKKPFNSIIEHLSVVFPCYNSTELAGFIKKVRSKNKNSLSGLSIDEIVQRVTEHILDEQKKKKPNPGKDKRTYEPSSATPVTRSSQGSPSVVVAPSPKTKGQKAEDVPVRIALGASSCEICHEVFKSKNVRVLKCGHKYHKGCFKQWLKGQSACPACQGRDLLTEESPSGRGWPSQNQELPSCSSR

SEQ ID NO: 5109 - protein, 2025 aa, Homo sapiens; identical to SEQ ID NO: 5108

SEQ ID NO: 5110 - protein, 478 aa, Homo sapiens
MGSRWSSEEERQPLLGPGLGPGLGASWRSREAAAAALPAAVPGPGRVYGRRWLVLLLFSLLAFVQGLVWNTWGPIQNSARQAYGFSSWDIALLVLWGPIGFLPCFAFMWLLDKRGLRITVLLTSFLMVLGTGLRCIPISDLILKRRLIHGGQMLNGLAGPTVMNAAPFLSTTWFSADERATATAIASMLSYLGGACAFLVGPLVVPAPNGTSPLLAAESSRAHIKDRIEAVLYAEFGVVCLIFSATLAYFPPRPPLPPSVAAASQRLSYRRSVCRLLSNFRFLMIALAYAIPLGVFAGWSGVLDLILTPAHVSQVDAGWIGFWSIVGGCVVGIAMARFADFIRGMLKLILLLLFSGATLSSTWFTLTCLNSITHLPLTTVTLYASCILLGVFLNSSVPIFFELFVETVYPVPEGITCGVVTFLSNMFMGVLLFFLTFYHTELSWFNWCLPGSCLLSLLLILCFRESYDRLYLDVVVSV

SEQ ID NO: 5111 - protein, 187 aa, Homo sapiens
MSEMAELSELYEESSDLQMDVMPGEGDLPQMEVGSGSRELSLRPSRSGAQQLEEEGPMEEEEAQPMAAPEGKRSLANGPNAGEQPGQVAGADFESEDEGEEFDDWEDDYDYPEEEQLSGAGYRVSAALEEADKMFLRTREPALDGGFQMHYEKTPFDQLAFIEELFSLMVVNRLTEELGCDEIIDRE

SEQ ID NO: 5112 - protein, 612 aa, Homo sapiens
MAAPEGSGLGEDARLDQETAQWLRWDKNSLTLEAVKRLIAEGNKEELRKCFGARMEFGTAGLRAAMGPGISRMNDLTIIQTTQGFCRYLEKQFSDLKQKGIVISFDARAHPSSGGSSRRFARLAATTFISQGIPVYLFSDITPTPFVPFTVSHLKLCAGIMITASHNPKQDNGYKVYWDNGAQIISPHDKGISQAIEENLEPWPQAWDDSLIDSSPLLHNPSASINNDYFEDLKKYCFHRSVNRETKVKFVHTSVHGVGHSFVQSAFKAFDLVPPEAVPEQKDPDPEFPTVKYPNPEEGKGVLTLSFALADKTKARIVLANDPDADRLAVAEKQDSGEWRVFSGNELGALLGWWLFTSWKEKNQDRSALKDTYMLSSTVSSKILRAIALKEGFHFEETLTGFKWMGNRAKQLIDQGKTVLFAFEEAIGYMCCPFVLDKDGVSAAVISAELASFLATKNLSLSQQLKAIYVEYGYHITKASYFICHDQETIKKLFENLRNYDGKNNYPKACGKFEISAIRDLTTGYDDSQPDKKAVLPTSKSSQMITFTFANGGVATMRTSGTEPKIKYYAELCAPPGNSDPEQLKKELNELVSAIEEHFFQPQKYNLQPKAD

SEQ ID NO: 5113 - protein, 622 aa, Homo sapiens
MAAAPRAGRRRGQPLLALLLLLLAPLPPGAPPGADAYFPEERWSPESPLQAPRVLIALLARNAAHALPTTLGALERLRHPRERTALWVATDHNMDNTSTVLREWLVAVKSLYHSVEWRPAEEPRSYPDEEGPKHWSDSRYEHVMKLRQAALKSARDMWADYILFVDADNLILNPDTLSLLIAENKTVVAPMLDSRAAYSNFWCGMTSQGYYKRTPAYIPIRKRDRRGCFAVPMVHSTFLIDLRKAASRNLAFYPPHPDYTWSFDDIIVFAFSCKQAEVQMYVCNKEEYGFLPVPLRAHSTLQDEAESFMHVQLEVMVKHPPAEPSRFISAPTKTPDKMGFDEVFMINLRRRQDRRERMLRALQAQEIECRLVEAVDGKAMNTSQVEALGIQMLPGYRDPYHGRPLTKGELGCFLSHYNIWKEVVDRGLQKSLVFEDDLRFEIFFKRRLMNLMRDVEREGLDWDLIYVGRKRMQVEHPEKAVPRVRNLVEADYSYWTLAYVISLQGARKLLAAEPLSKMLPVDEFLPVMFDKHPVSEYKAHFSLRNLHAFSVEPLLIYPTHYTGDDGYVSDTETSVVWNNEHVKTDWDRAKSQKMREQQALSREAKNSDVLQSPLDSAARDEL

SEQ ID NO: 5114 - protein, 833 aa, Homo sapiens
MDVVDPDIFNRDPRDHYDLLQRLGGGTYGEVFKARDKVSGDLVALKMVKMEPDDDVSTLQKEILILKTCRHANIVAYHGSYLWLQKLWICMEFCGAGSLQDIYQVTGSLSELQISYVCREVLQGLAYLHSQKKIHRDIKGANILINDAGEVRLADFGISAQIGATLARRLSFIGTPYWMAPEVAAVALKGGYNELCDIWSLGITAIELAELQPPLFDVHPLRVLFLMTKSGYQPPRLKEKGKWSAAFHNFIKVTLTKSPKKRPSATKMLSHQLVSQPGLNRGLILDLLDKLKNPGKGPSIGDIEDEEPELPPAIPRRIRSTHRSSSLGIPDADCCRRHMEFRKLRGMETRPPANTARLQPPRDLRSSSPRKQLSESSDDDYDDVDIPTPAEDTPPPLPPKPKFRSPSDEGPGSMGDDGQLSPGVLVRCASGPPPNSPRPGPPPSTSSPHLTAHSEPSLWNPPSRELDKPPLLPPKKEKMKRKGCALLVKLFNGCPLRIHSTAAWTHPSTKDQHLLLGAEEGIFILNRNDQEATLEMLFPSRTTWVYSINNVLMSLSGKTPHLYSHSILGLLERKETRAGNPIAHISPHRLLARKNMVSTKIQDTKGCRACCVAEGASSGGPFLCGALETSVVLLQWYQPMNKFLLVRQVLFPLPTPLSVFALLTGPGSELPAVCIGVSPGRPGKSVLFHTVRFGALSCWLGEMSTEHRGPVQVTQVEEDMVMVLMDGSVKLVTPEGSPVRGLRTPEIPMTEAVEAVAMVGGQLQAFWKHGVQVWALGSDQLLQELRDPTLTFRLLGSPRLECSGTISPHCNLLLPGSSNSPASASRVAGITGL

SEQ ID NO: 5115 - protein, 508 aa, Homo sapiens
MLLWSLLVIFDAVTEQADSLTLVAPSSVFEGDSIVLKCQGEQNWKIQKMAYHKDNKELSVFKKFSDFLIQSAVLSDSGNYFCSTKGQLFLWDKTSNIVKIKVQELFQRPVLTASSFQPIEGGPVSLKCETRLSPQRLDVQLQFCFFRENQVLGSGWSSSPELQISAVWSEDTGSYWCKAETVTHRIRKQSLQSQIHVQRIPISNVSLEIRAPGGQVTEGQKLILLCSVAGGTGNVTFSWYREATGTSMGKKTQRSLSAELEIPAVKESDAGKYYCRADNGHVPIQSKVVNIPVRIPVSRPVLTLRSPGAQAAVGDLLELHCEALRGSPPILYQFYHEDVTLGNSSAPSGGGASFNLSLTAEHSGNYSCEANNGLGAQCSEAVPVSISGPDGYRRDLMTAGVLWGLFGVLGFTGVALLLYALFHKISGESSATNEPRGASRPNPQEFTYSSPTPDMEELQPVYVNVGSVDVDVVYSQVWSMQQPESSANIRTLLENKDSQVIYSSVKKS

SEQ ID NO: 5116 - protein, 255 aa, Homo sapiens
MWEWKICNSHGARPFAEPAGWEFVNLLRHHKSFLIAPLCLSVPVSRPVLTLRSPGAQAAVGDLLELHCEALRGSPPILYQFYHEDVTLGNSSAPSGGGASFNLSLTAEHSGNYSCEANNGLGAQCSEAVPVSISGPDGYRRDLMTAGVLWGLFGVLGFTGVALLLYALFHKISGESSATNEPRGASRPNPQEFTYSSPTPDMEELQPVYVNVGSVDVDVVYSQVWSMQQPESSANIRTLLENKDSQVIYSSVKKS

SEQ ID NO: 5117 - protein, 418 aa, Homo sapiens
MLPNTGRLAGCTVFITGASRGIGKAIALKAAKDGANIVIAAKTAQPHPKLLGTIYTAAEEIEAVGGKALPCIVDVRDEQQISAAVEKAIKKFGGIDILVNNASAISLTNTLDTPTKRLDLMMNVNTRGTYLASKACIPYLKKSKVAHILNISPPLNLNPVWFKQHCAYTIAKYGMSMYVLGMAEEFKGEIAVNALWPKTAIHTAAMDMLGGPGIESQCRKVDIIADAAYSIFQKPKSFTGNFVIDENILKEEGIENFDVYAIKPGHPLQPDFFLDEYPEAVSKKVESTGAVPEFKEEKLQLQPKPRSGAVEETFRIVKDSLSDDVVKATQAIYLFELSGEDGGTWFLDLKSKGGNVGYGEPSDQADVVMSMTTDDFVKMFSGKLKPTMAFMSGKLKIKGNMALAIKLEKLMNQMNARL

SEQ ID NO: 5118 - protein, 436 aa, Homo sapiens
MRRDVNGVTKSRFEMFSNSDEAVINKKLPKELLLRIFSFLDVVTLCRCAQVSRAWNVLALDGSNWQRIDLFDFQRDIEGRVVENISKRCGGFLRKLSLRGCLGVGDNALRTFAQNCRNIEVLNLNGCTKTTDATCTSLSKFCSKLRHLDLASCTSITNMSLKALSEGCPLLEQLNISWCDQVTKDGIQALVRGCGGLKALFLKGCTQLEDEALKYIGAHCPELVTLNLQTCLQITDEGLITICRGCHKLQSLCASGCSNITDAILNALGQNCPRLRILEVARCSQLTDVGFTTLARNCHELEKMDLEECVQITDSTLIQLSIHCPRLQVLSLSHCELITDDGIRHLGNGACAHDQLEVIELDNCPLITDASLEHLKSCHSLERIELYDCQQITRAGIKRLRTHLPNIKVHAYFAPVTPPPSVGGSRQRFCRCCIIL

SEQ ID NO: 5119 - protein, 323 aa, Homo sapiens
MSERKVLNKYYPPDFDPSKIPKLKLPKDRQYVVRLMAPFNMRCKTCGEYIYKGKKFNARKETVQNEVYLGLPIFRFYIKCTRCLAEITFKTDPENTDYTMEHGATRNFQAEKLLEEEEKRVQKEREDEELNNPMKVLENRTKDSKLEMEVLENLQELKDLNQRQAHVDFEAMLRQHRLSEEERRRQQQEEDEQETAALLEEARKRRLLEDSDSEDEAAPSPLQPALRPNPTAILDEAPKPKRKVEVWEQSVGSLGSRPPLSRLVVVKKAKADPDCSNGQPQAAPTPGAPQNRKEANPTPLTPGASSLSQLGAYLDSDDSNGSN

SEQ ID NO: 5120 - protein, 846 aa, Homo sapiens
MLFTVSCSKMSSIVDRDDSSIFDGLVEEDDKDKAKRVSRNKSEKKRRDQFNVLIKELGSMLPGNARKMDKSTVLQKSIDFLRKHKEITAQSDASEIRQDWKPTFLSNEEFTQLMLEALDGFFLAIMTDGSIIYVSESVTSLLEHLPSDLVDQSIFNFIPEGEHSEVYKILSTHLLESDSLTPEYLKSKNQLEFCCHMLRGTIDPKEPSTYEYVKFIGNFKSLNSVSSSAHNGFEGTIQRTHRPSYEDRVCFVATVRLATPQFIKEMCTVEEPNEEFTSRHSLEWKFLFLDHRAPPIIGYLPFEVLGTSGYDYYHVDDLENLAKCHEHLMQYGKGKSCYYRFLTKGQQWIWLQTHYYITYHQWNSRPEFIVCTHTVVSYAEVRAERRRELGIEESLPETAADKSQDSGSDNRINTVSLKEALERFDHSPTPSASSRSSRKSSHTAVSDPSSTPTKIPTDTSTPPRQHLPAHEKMVQRRSSFSSQSINSQSVGSSLTQPVMSQATNLPIPQGMSQFQFSAQLGAMQHLKDQLEQRTRMIEANIHRQQEELRKIQEQLQMVHGQGLQMFLQQSNPGLNFGSVQLSSGNSSNIQQLAPINMQGQVVPTNQIQSGMNTGHIGTTQHMIQQQTLQSTSTQSQQNVLSGHSQQTSLPSQTQSTLTAPLYNTMVISQPAAGSMVQIPSSMPQNSTQSAAVTTFTQDRQIRFSQGQQLVTKLVTAPVACGAVMVPSTMLMGQVVTAYPTFATQQQQSQTLSVTQQQQQQSSQEQQLTSVQQPSQAQLTQPPQQFLQTSRLLHGNPSTQLILSAAFPLQQSTFPQSHHQQHQSQQQQQLSRHRTDSLPDPSKVQPQ

SEQ ID NO: 5121 - protein, 221 aa, Homo sapiens
MSSRPGREDVGAAGARRPREPPEQELQRRREQKRRRHDAQQLQQLKHLESFYEKPPPGLIKEDETKPEDCIPDVPGNEHAREFLAHAPTKGLWMPLGKEVKVMQCWRCKRYGHRTGDKECPFFIKGNQKLEQFRVAHEDPMYDIIRDNKRHEKDVRIQQLKQLLEDSTSDEDRSSSSSSEGKEKHKKKKKKEKHKKRKKEKKKKKKRKHKSSKSNEGSDSE

SEQ ID NO: 5122 - protein, 903 aa, Homo sapiens
MAIQFRSLFPLALPGMLALLGWWWFFSRKKGHVSSHDEQQVEAGAVQLRADPAIKEPLPVEDVCPKVVSTPPSVTEPPEKELSTVSKLPAEPPALLQTHPPCRRSESSGILPNTTDMRLRPGTRRDDSTKLELALTGGEAKSIPLECPLSSPKGVLFSSKSAEVCKQDSPFSRVPRKVQPGYPVVPAEKRSSGERARETGGAEGTGDAVLGEKVLEEALLSREHVLELENSKGPSLASLEGEEDKGKSSSSQVVGPVQEEEYVAEKLPSRFIESAHTELAKDDAAPAPPVADAKAQDRGVEGELGNEESLDRNEEGLDRNEEGLDRNEESLDRNEEGLDRNEEIKRAAFQIISQVISEATEQVLATTVGKVAGRVCQASQLQGQKEESCVPVHQKTVLGPDTAEPATAEAAVAPPDAGLPLPGLPAEGSPPPKTYVSCLKSLLSSPTKDSKPNISAHHISLASCLALTTPSEELPDRAGILVEDATCVTCMSDSSQSVPLVASPGHCSDSFSTSGLEDSCTETSSSPRDKAITPPLPESTVPFSNGVLKGELSDLGAEDGWTMDAEADHSGGSDRNSMDSVDSCCSLKKTESFQNAQAGSNPKKVDLIIWEIEVPKHLVGRLIGKQGRYVSFLKQTSGAKIYISTLPYTQSVQICHIEGSQHHVDKALNLIGKKFKELNLTNIYAPPLPSLALPSLPMTSWLMLPDGITVEVIVVNQVNAGHLFVQQHTHPTFHALRSLDQQMYLCYSQPGIPTLPTPVEITVICAAPGADGAWWRAQVVASYEETNEVEIRYVDYGGYKRVKVDVLRQIRSDFVTLPFQGAEVLLDSVMPLSDDDQFSPEADAAMSEMTGNTALLAQVTSYSPTGLPLIQLWSVVGDEVVLINRSLVERGLAQWVDSYYTSL

SEQ ID NO: 5123 - protein, 593 aa, Homo sapiens
MAIQFRSLFPLALPGMLALLGWWWFFSRKKGHVSSHDEQQVEAGAVQLRADPAIKEPLPVEDVCPKVVSTPPSVTEPPEKELSTVSKLPAEPPALLQTHPPCRRSESSGILPNTTDMRLRPGTRRDDSTKLELALTGGEAKSIPLECPLSSPKGVLFSSKSAEVCKQDSPFSRVPRKVQPGYPVVPAEKRSSGERARETGGAEGTGDAVLGEKVLEEALLSREHVLELENSKGPSLASLEGEEDKGKSSSSQVVGPVQEEEYVAEKLPSRFIESAHTELAKDDAAPAPPVADAKAQDRGVEGELGNEESLDRNEEGLDRNEEGLDRNEESLDRNEEGLDRNEEIKRAAFQIISQVISEATEQVLATTVGKVAGRVCQASQLQGQKEESCVPVHQKTVLGPDTAEPATAEAAVAPPDAGLPLPGLPAEGSPPPKTYVSCLKSLLSSPTKDSKPNISAHHISLASCLALTTPSEELPDRAGILVEDATCVTCMSDSSQSVPLVASPGHCSDSFSTSGLEDSCTETSSSPRDKAITPPLPESTVPFSNGVLKGELSDLGAEDGWTMDAEADHSGVAAPPPGKRGTLITRCPGFFEC

SEQ ID NO: 5124 - protein, 804 aa, Homo sapiens
MAAHRPGPLKQQNKAHKGGRHRGRGSAQRDGKGRLALKTLSKKVRKELSRVDQRHRASQLRKQKKEAVLAEKRQLGGKDGPPHQVLVVPLHSRISLPEAMQLLQDRDTGTVHLNELGNTQNFMLLCPRLKHRWFFTSARPGDLHVVLDMAKVADTILFLLDPLEGWDSTGDYCLSCLFAQGLPTYTLAVQGISGLPLKKQIDTRKKLSKAVEKRFPHDKLLLLDTQQEAGMLLRQLANQKQQHLAFRDRRAYLFAHAVDFVPSEENNLVGTLKISGYVRGQTLNVNRLLHIVGYGDFQMKQIDAPGDPFPLNPRGIKPQKDPDMAMEICATDAVDDMEEGLKVLMKADPGRQESLQAEVIPDPMEGEQTWPTEEELSEAKDFLKESSKVVKKVPKGTSSYQAEWILDGGSQSGGEGDEYEYDDMEHEDFMEEESQDESSEEEEEYETMTIGESVHDDLYDKKVDEEAEAKMLEKYKQERLEEMFPDEVDTPRDVAARIRFQKYRGLKSFRTSPWDPKENLPQDYARIFQFQNFTNTRKSIFKEVEEKEVEGAEVGWYVTLHVSEVPVSVVECFRQGTPLIAFSLLPHEQKMSVLNMVVRRDPGNTEPVKAKEELIFHCGFRRFRASPLFSQHTAADKHKLQRFLTADMALVATVYAPITFPPASVLLFKQKSNGMHSLIATGHLMSVDPDRMVIKRVVLSGHPFKIFTKMAVVRYMFFNREDVLWFKPVELRTKWGRRGHIKEPLGTHGHMKCSFDGKLKSQDTVLMNLYKRVFPKWTYDPYVPEPVPWLKSEISSTVPQGGME

SEQ ID NO: 5125 - protein, 253 aa, Homo sapiens
MSCTIEKALADAKALVERLRDHDDAAESLIEQTTALNKRVEAMKQYQEEIQELNEVARHRPRSTLVMGIQQENRQIRELQQENKELRTSLEEHQSALELIMSKYREQMFRLLMASKKDDPGIIMKLKEQHSKIDMVHRNKSEGFFLDASRHILEAPQHGLERRHLEANQNELQAHVDQITEMAAVMRKAIEIDEQQGCKEQERIFQLEQENKGLREILQITRESFLNLRKDDASESTSLSALVTNSDLSLRKS

SEQ ID NO: 5126 - protein, 132 aa, Homo sapiens
MGIVANFQELAVPVVHDGGALLAFVCGVVYTLLQSIISYKSCPQWNSLSTCHIRMVISAVSCAAVIPMIVCASLISITKLEWNPREKDYVYHVVSAICEWTVAFGFIFYFLTFIQDFQSVTLRISTEINGDI

SEQ ID NO: 5127 - protein, 320 aa, Homo sapiens
MVGYDPKPDGRNNTKFQVAVAGSVSGLVTRALISPFDVIKIRFQLQHERLSRSDPSAKYHGILQASRQILQEEGPTAFWKGHVPAQILSIGYGAVQFLSFEMLTELVHRGSVYDALEFSVHFVCGGLAACMATLTVHPVDVLRTRFAAQGEPKVYNTLRHAVGTMYRSEGPQVFYKGLAPTLIAIFPYAGLQFSCYSSLKHLYKWAIPAEGKKNENLQNLLCGSGAGVISKTLTYPLDLFKKRLQVGGFEHARAAFGQVRRYKGLMDCAKQVLQKEGALGFFKGLSPSLLKAALSTGFMFFSYEFFCNVFHCMNRTASQR

SEQ ID NO: 5128 - protein, 753 aa, Homo sapiens
MRGLGALLLSHNCLSELPEALGALPALTFLTVTHNRLQTLPPALGALSTLQRLDLSQNLLDTLPPEIGGLGSLLELNLASNRLQSLPASLAGLRSLRLLVLHSNLLASVPADLARLPLLTRLDLRDNQLRDLPPELLDAPFVRLQGNPLGEASPDAPSSPVAALIPEMPRLFLTSDLDSFPVTPQGCSVTLACGVRLQFPAGATATPITIRYRLLLPEPGLVPLGPHDALLSHVLELQPHGVAFQQDVGLWLLFTPPQARRCREVVVRTRNDNSWGDLETYLEEEAPQRLWAHCQVPHFSWFLVVSRPVSNACLVPPEGTLLCSSGHPGVKVIFPPGATEEPRRVSMQVVRMAGRELQALLGEPEAAVSPLLCLSQSGPPSFLQPVTVQLPLPSGITGLSLDRSRLHLLYWAPPAATWDDITAQVVLELTHLYWLWYTTKNCVGGLARKAWERLRLHRVNLIALQRRRDPEQVLLQCLPRNKVDATLRRLLERYRGPEPSDTVEMFEGEEFFAAFERGIDVDADRPDCVEGRICFVFYSHLKNVKEVYVTTTLDREAQAVRGQVSFYRGAVPVRVPEEAEAARQRKGADALWMATLPIKLPRLRGSEGPRRGAGLSLAPLNLGDAETGFLTQSNLLSVAGRLGLDWPAVALHLGVSYREVQRIRHEFRDDLDEQIRHMLFSWAERQAGQPGAVGLLVQALEQSDRQDVAEEVRAVLELGRRKYQDSIRRMGLAPKDPALPGSSAPQPPEPAQA

SEQ ID NO: 5129 - protein, 910 aa, Homo sapiens
MAATVEGPELEAAAAAGDASEDSDAGSRALPFLGGNRLSLDLYPGGCQQLLHLCVQQPLQLLQVEFLRLSTHEDPQLLEATLAQLPQSLSCLRSLVLKGGQRRDTLGACLRGALTNLPAGLSGLAHLAHLDLSFNSLETLPACVLQMRGLGALLLSHNCLSELPEALGALPALTFLTVTHNRLQTLPPALGALSTLQRLDLSQNLLDTLPPEIGGLGSLLELNLASNRLQSLPASLAGLRSLRLLVLHSNLLASVPADLARLPLLTRLDLRDNQLRDLPPELLDAPFVRLQGNPLGEASPDAPSSPVAALIPEMPRLFLTSDLDSFPVTPQGCSVTLACGVRLQFPAGATATPITIRYRLLLPEPGLVPLGPHDALLSHVLELQPHGVAFQQDVGLWLLFTPPQARRCREVVVRTRNDNSWGDLETYLEEEAPQRLWAHCQVPHFSWFLVVSRPVSNACLVPPEGTLLCSSGHPGVKVIFPPGATEEPRRVSMQVVRMAGRELQALLGEPEAAVSPLLCLSQSGPPSFLQPVTVQLPLPSGITGLSLDRSRLHLLYWAPPAATWDDITAQVVLELTHLYARFQVTHFSWYWLWYTTKNCVGGLARKAWERLRLHRVNLIALQRRRDPEQVLLQCLPRNKVDATLRRLLERYRGPEPSDTVEMFEGEEFFAAFERGIDVDADRPDCVEGRICFVFYSHLKNVKEVYVTTTLDREAQAVRGQVSFYRGAVPVRVPEEAEAARQRKGADALWMATLPIKLPRLRGSEGPRRGAGLSLAPLNLGDAETGFLTQSNLLSVAGRLGLDWPAVALHLGVSYREVQRIRHEFRDDLDEQIRHMLFSWAERQAGQPGAVGLLVQALEQSDRQDVAEEVRAVLELGRRKYQDSIRRMGLAPKDPALPGSSAPQPPEPAQA

SEQ ID NO: 5130 - protein, 893 aa, Homo sapiens
MAATVEGPELEAAAAAGDASEDSDAGSRALPFLGGNRLSLDLYPGGCQQLLHLCVQQPLQLLQVEFLRLSTHEDPQLLEATLAQLPQSLSCLRSLVLKGGQRRDTLGACLRGALTNLPAGLSGLAHLAHLDLSFNSLETLPACVLQMRGLGALLLSHNCLSELPEALGALPALTFLTVTHNRLQTLPPALGALSTLQRLDLSQNLLDTLPPEIGGLGSLLELNLASNRLQSLPASLAGLRSLRLLVLHSNLLASVPADLARLPLLTRLDLRDNQLRDLPPELLDAPFVRLQGNPLGEASPDAPSSPVAALIPEMPRLFLTSDLDSFPVTPQGCSVTLACGVRLQFPAGATATPITIRYRLLLPEPGLVPLGPHDALLSHVLELQPHGVAFQQDVGLWLLFTPPQARRCREVVVRTRNDNSWGDLETYLEEEAPQRLWAHCQVPHFSWFLVVSRPVSNACLVPPEGTLLCSSGHPGVKVIFPPGATEEPRRVSMQVVRMAGRELQALLGEPEAAVSPLLCLSQSGPPSFLQPVTVQLPLPSGITGLSLDRSRLHLLYWAPPAATWDDITAQVVLELTHLYARFQVTHFSWYWLWYTTKNCVGGLARKAWERLRLHRVNLIALQRRRDPEQVLLQCLPRNKVDATLRRLLERYRGPEPSDTVEMFEGEEFFAAFERGIDVDADRPDCVEGRICFVFYSHLKNVKEVSFYRGAVPVRVPEEAEAARQRKGADALWMATLPIKLPRLRGSEGPRRGAGLSLAPLNLGDAETGFLTQSNLLSVAGRLGLDWPAVALHLGVSYREVQRIRHEFRDDLDEQIRHMLFSWAERQAGQPGAVGLLVQALEQSDRQDVAEEVRAVLELGRRKYQDSIRRMGLAPKDPALPGSSAPQPPEPAQA

SEQ ID NO: 5131 - protein, 479 aa, Homo sapiens
MAVLGVQLVVTLLTATLMHRLAPHCSFARWLLCNGSLFRYKHPSEEELRALAGKPRPRGRKERWANGLSEEKPLSVPRDAPFQLETCPLTTVDALVLRFFLEYQWFVDFAVYSGGVYLFTEAYYYMLGPAKETNIAVFWCLLTVTFSIKMFLTVTRLYFSAEEGGERSVCLTFAFLFLLLAMLVQVVREETLELGLEPGLASMTQNLEPLLKKQGWDWALPVAKLAIRVGLAVVGSVLGAFLTFPGLRLAQTHRDALTMSEDRPMLQFLLHTSFLSPLFILWLWTKPIARDFLHQPPFGETRFSLLSDSAFDSGRLWLLVVLCLLRLAVTRPHLQAYLCLAKARVEQLRREAGRIEAREIQQRVVRVYCYVTVVSLQYLTPLILTLNCTLLLKTLGGYSWGLGPAPLLSPDPSSASAAPIGSGEDEVQQTAARIAGALGGLLTPLFLRGVLAYLIWWTAACQLLASLFGLYFHQHLAGS

SEQ ID NO: 5132 - protein, 439 aa, Homo sapiens
MFSKLAHLQRFAVLSRGVHSSVASATSVATKKTVQGPPTSDDIFEREYKYGAHNYHPLPVALERGKGIYLWDVEGRKYFDFLSSYSAVNQGHCHPKIVNALKSQVDKLTLTSRAFYNNVLGEYEEYITKLFNYHKVLPMNTGVEAGETACKLARKWGYTVKGIQKYKAKIVFAAGNFWGRTLSAISSSTDPTSYDGFGPFMPGFDIIPYNDLPALERALQDPNVAAFMVEPIQGEAGVVVPDPGYLMGVRELCTRHQVLFIADEIQTGLARTGRWLAVDYENVRPDIVLLGKALSGGLYPVSAVLCDDDIMLTIKPGEHGSTYGGNPLGCRVAIAALEVLEEENLAENADKLGIILRNELMKLPSDVVTAVRGKGLLNAIVIKETKDWDAWKVCLRLRDNGLLAKPTHGDIIRFAPPLVIKEDELRESIEIINKTILSF

SEQ ID NO: 5133 - protein, 856 aa, Homo sapiens
MDVRRLKVNELREELQRRGLDTRGLKAELAERLQAALEAEEPDDERELDADDEPGRPGHINEEVETEGGSELEGTAQPPPPGLQPHAEPGGYSGPDGHYAMDNITRQNQFYDTQVIKQENESGYERRPLEMEQQQAYRPEMKTEMKQGAPTSFLPPEASQLKPDRQQFQSRKRPYEENRGRGYFEHREDRRGRSPQPPAEEDEDDFDDTLVAIDTYNCDLHFKVARDRSSGYPLTIEGFAYLWSGARASYGVRRGRVCFEMKINEEISVKHLPSTEPDPHVVRIGWSLDSCSTQLGEEPFSYGYGGTGKKSTNSRFENYGDKFAENDVIGCFADFECGNDVELSFTKNGKWMGIAFRIQKEALGGQALYPHVLVKNCAVEFNFGQRAEPYCSVLPGFTFIQHLPLSERIRGTVGPKSKAECEILMMVGLPAAGKTTWAIKHAASNPSKKYNILGTNAIMDKMRVMGLRRQRNYAGRWDVLIQQATQCLNRLIQIAARKKRNYILDQTNVYGSAQRRKMRPFEGFQRKAIVICPTDEDLKDRTIKRTDEEGKDVPDHAVLEMKANFTLPDVGDFLDEVLFIELQREEADKLVRQYNEEGRKAGPPPEKRFDNRGGGGFRGRGGGGGFQRYENRGPPGGNRGGFQNRGGGSGGGGNYRGGFNRSGGGGYSQNRWGNNNRDNNNSNNRGSYNRAPQQQPPPQQPPPPQPPPQQPPPPPSYSPARNPPGASTYNKNSNIPGSSANTSTPTVSSYSPPQPSYSQPPYNQGGYSQGYTAPPPPPPPPPAYNYGSYGGYNPAPYTPPPPPTAQTYPQPSYNQYQQYAQQWNQYYQNQGQWPPYYGNYDYGSYSGNTQGGTSTQ

SEQ ID NO: 5134 - protein, 756 aa, Homo sapiens
MDNITRQNQFYDTQVIKQENESGYERRPLEMEQQQAYRPEMKTEMKQGAPTSFLPPEASQLKPDRQQFQSRKRPYEENRGRGYFEHREDRRGRSPQPPAEEDEDDFDDTLVAIDTYNCDLHFKVARDRSSGYPLTIEGFAYLWSGARASYGVRRGRVCFEMKINEEISVKHLPSTEPDPHVVRIGWSLDSCSTQLGEEPFSYGYGGTGKKSTNSRFENYGDKFAENDVIGCFADFECGNDVELSFTKNGKWMGIAFRIQKEALGGQALYPHVLVKNCAVEFNFGQRAEPYCSVLPGFTFIQHLPLSERIRGTVGPKSKAECEILMMVGLPAAGKTTWAIKHAASNPSKKYNILGTNAIMDKMRVMGLRRQRNYAGRWDVLIQQATQCLNRLIQIAARKKRNYILDQTNVYGSAQRRKMRPFEGFQRKAIVICPTDEDLKDRTIKRTDEEGKDVPDHAVLEMKANFTLPDVGDFLDEVLFIELQREEADKLVRQYNEEGRKAGPPPEKRFDNRGGGGFRGRGGGGGFQRYENRGPPGGNRGGFQNRGGGSGGGGNYRGGFNRSGGGGYSQNRWGNNNRDNNNSNNRGSYNRAPQQQPPPQQPPPPQPPPQQPPPPPSYSPARNPPGASTYNKNSNIPGSSANTSTPTVSSYSPPQPSYSQPPYNQGGYSQGYTAPPPPPPPPPAYNYGSYGGYNPAPYTPPPPPTAQTYPQPSYNQYQQYAQQWNQYYQNQGQWPPYYGNYDYGSYSGNTQGGTSTQ

SEQ ID NO: 5135 - protein, 804 aa, Homo sapiens
MDVRRLKVNELREELQRRGLDTRGLKAELAERLQAALEAEEPDDERELDADDEPGRPGHINEEVETEGGSELEGTAQPPPPGLQPHAEPGGYSGPDGHYAMDNITRQNQFYDTQVIKQENESGYERRPLEMEQQQAYRPEMKTEMKQGAPTSFLPPEASQLKPDRQQFQSRKRPYEENRGRGYFEHREDRRGRSPQPPAEEDEDDFDDTLVAIDTYNCDLHFKVARDRSSGYPLTIEGFAYLWSGARASYGVRRGRVCFEMKINEEISVKHLPSTEPDPHVVRIGWSLDSCSTQLGEEPFSYGYGGTGKKSTNSRFENYGDKFAENDVIGCFADFECGNDVELSFTKNGKWMGIAFRIQKEALGGQALYPHVLVKNCAVEFNFGQRAEPYCSVLPGFTFIQHLPLSERIRGTVGPKSKAECEILMMVGLPAAGKTTWAIKHAASNPSKKYNILGTNAIMDKMRVMGLRRQRNYAGRWDVLIQQATQCLNRLIQIAARKKRNYILDQTNVYGSAQRRKMRPFEGFQRKAIVICPTDEDLKDRTIKRTDEEGKDVPDHAVLEMKANFTLPDVGDFLDEVLFIELQREEADKLVRQYNEEGRKAGPPPEKRFDNRGGGGFRGRGGGGGFQRYENRGPPGGNRGGFQNRGGGSGGGGNYRGGFNRSGGGGYSQNRWGNNNRDNNNSNNRGSYNRAPQQQPPPQQPPPPQPPPQQPPPPPSYSPARNPPGASTYNKNSNIPGSSANTSTPTVSSYSPPQTYPQPSYNQYQQYAQQWNQYYQNQGQWPPYYGNYDYGSYSGNTQGGTSTQ

SEQ ID NO: 5136 - protein, 122 aa, Homo sapiens
MDVRRLKVNELREELQRRGLDTRGLKAELAERLQAALEAEEPDDERELDADDEPGRPGHINEEAELQPATLQPGRLQPGLHSPTASTSTTTCLQLWELRRLQPGPLYPTATPHCTDLPSAQL

SEQ ID NO: 5137 - protein, 589 aa, Homo sapiens
MRPLPGALGVAAAAALWLLLLLLPRTRADEHEHTYQDKEEVVLWMNTVGPYHNRQETYKYFSLPFCVGSKKSISHYHETLGEALQGVELEFSGLDIKFKDDVMPATYCEIDLDKEKRDAFVYAIKNHYWYQMYIDDLPIWGIVGEADENGEDYYLWTYKKLEIGFNGNRIVDVNLTSEGKVKLVPNTKIQISYSVKWKKSDVKFEDRFDKYLDPSFFQHRIHWFSIFNSFMMVIFLVGLVSMILMRTLRKDYARYSKEEEMDDMDRDLGDEYGWKQVHGDVFRPSSHPLIFSSLIGSGCQIFAVSLIVIIVAMIEDLYTERGSMLSTAIFVYAATSPVNGYFGGSLYARQGGRRWIKQMFIGAFLIPAMVCGTAFFINFIAIYYHASRAIPFGTMVAVCCICFFVILPLNLVGTILGRNLSGQPNFPCRVNAVPRPIPEKKWFMEPAVIVCLGGILPFGSIFIEMYFIFTSFWAYKIYYVYGFMMLVLVILCIVTVCVTIVCTYFLLNAEDYRWQWTSFLSAASTAIYVYMYSFYYYFFKTKMYGLFQTSFYFGYMAVFSTALGIMCGAIGYMGTSAFVRKIYTNVKID

SEQ ID NO: 5138 - protein, 1342 aa, Homo sapiens
MMEIQMDEGGGVVVYQDDYCSGSVMSERVSGLAGSIYREFERLIHCYDEEVVKELMPLVVNVLENLDSVLSENQEHEVELELLREDNEQLLTQYEREKALRRQAEEKFIEFEDALEQEKKELQIQVEHYEFQTRQLELKAKNYADQISRLEERESEMKKEYNALHQRHTEMIQTYVEHIERSKMQQVGGNSQTESSLPGRSRKERPTSLNVFPLADGTVRAQIGGKLVPAGDHWHLSDLGQLQSSSSYQCPQDEMSESGQSSAAATPSTTGTKSNTPTSSVPSAAVTPLNESLQPLGDYGVGSKNSKRAREKRDSRNMEVQVTQEMRNVSIGMGSSDEWSDVQDIIDSTPELDMCPETRLDRTGSSPTQGIVNKAFGINTDSLYHELSTAGSEVIGDVDEGADLLGETSAPSVSGMGKEVGNLLLENSQLLETKNALNVVKNDLIAKVDQLSGEQEVLRGELEAAKQAKVKLENRIKELEEELKRVKSEAIIARREPKEEAEDVSSYLCTESDKIPMAQRRRFTRVEMARVLMERNQYKERLMELQEAVRWTEMIRASREHPSVQEKKKSTIWQFFSRLFSSSSSPPPAKRPYPSVNIHYKSPTTAGFSQRRNHAMCPISAGSRPLEFFPDDDCTSSARREQKREQYRQVREHVRNDDGRLQACGWSLPAKYKQLSPNGGQEDTRMKNVPVPVYCRPLVEKDPTMKLWCAAGVNLSGWRPNEDDAGNGVKPAPGRDPLTCDREGDGEPKSAHTSPEKKKAKELPEMDATSSRVWILTSTLTTSKVVIIDANQPGTVVDQFTVCNAHVLCISSIPAASDSDYPPGEMFLDSDVNPEDPGADGVLAGITLVGCATRCNVPRSNCSSRGDTPVLDKGQGEVATIANGKVNPSQSTEEATEATEVPDPGPSEPETATLRPGPLTEHVFTDPAPTPSSGPQPGSENGPEPDSSSTRPEPEPSGDPTGAGSSAAPTMWLGAQNGWLYVHSAVANWKKCLHSIKLKDSVLSLVHVKGRVLVALADGTLAIFHRGEDGQWDLSNYHLMDLGHPHHSIRCMAVVYDRVWCGYKNKVHVIQPKTMQIEATMTPQKSFDAHPRRESQVRQLAWIGDGVWVSIRLDSTLRLYHAHTHQHLQDVDIEPYVSKMLGTGKLGFSFVRITALLVAGSRLWVGTGNGVVISIPLTETVVLHRGQLLGLRANKTSPTSGEGARPGGIIHVYGDDSSDRAASSFIPYCSMAQAQLCFHGHRDAVKFFVSVPGNVLATLNGSVLDSPAEGPGPAAPASEVEGQKLRNVLVLSGGEGYIDFRIGDGEDDETEEGAGDMSQVKPVLSKAERSHIIVWQVSYTPE

SEQ ID NO: 5139 - protein, 1336 aa, Homo sapiens
MMEIQMDEGGGVVVYQDDYCSGSVMSERVSGLAGSIYREFERLIHCYDEEVVKELMPLVVNVLENLDSVLSENQEHEVELELLREDNEQLLTQYEREKALRRQAEEKFIEFEDALEQEKKELQIQVEHYEFQTRQLELKAKNYADQISRLEERESEMKKEYNALHQRHTEMIQTYVEHIERSKMQQVGGNSQTESSLPGRRKERPTSLNVFPLADGTVRAQIGGKLVPAGDHWHLSDLGQLQSSSSYQCPQDEMSESGQSSAAATPSTTGTKSNTPTSSVPSAAVTPLNESLQPLGDYGVGSKNSKRAREKRDSRNMEVQVTQEMRNVSIGMGSSDEWSDVQDIIDSTPELDMCPETRLDRTGSSPTQGIVNKAFGINTDSLYHELSTAGSEVIGDVDEGADLLGEFSVRDDFFGMGKEVGNLLLENSQLLETKNALNVVKNDLIAKVDQLSGEQEVLRGELEAAKQAKVKLENRIKELEEELKRVKSEAIIARREPKEEAEDVSSYLCTESDKIPMAQRRRFTRVEMARVLMERNQYKERLMELQEAVRWTEMIRASREHPSVQEKKKSTIWQFFSRLFSSSSSPPPAKRPYPSVNIHYKSPTTAGFSQRRNHAMCPISAGSRPLEFFPDDDCTSSARREQKREQYRQVREHVRNDDGRLQACGWSLPAKYKQLSPNGGQEDTRMKNVPVPVYCRPLVEKDPTMKLWCAAGVNLSGWRPNEDDAGNGVKPAPGRDPLTCDREGDGEPKSAHTSPEKKKAKELPEMDATSSRVWILTSTLTTSKVVIIDANQPGTVVDQFTVCNAHVLCISSIPAASDSDYPPGEMFLDSDVNPEDPGADGVLAGITLVGCATRCNVPRSNCSSRGDTPVLDKGQGEVATIANGKVNPSQSTEEATEATEVPDPGPSEPETATLRPGPLTEHVFTDPAPTPSSGPQPGSENGPEPDSSSTRPEPEPSGDPTGAGSSAAPTMWLGAQNGWLYVHSAVANWKKCLHSIKLKDSVLSLVHVKGRVLVALADGTLAIFHRGEDGQWDLSNYHLMDLGHPHHSIRCMAVVYDRVWCGYKNKVHVIQPKTMQIEKSFDAHPRRESQVRQLAWIGDGVWVSIRLDSTLRLYHAHTHQHLQDVDIEPYVSKMLGTGKLGFSFVRITALLVAGSRLWVGTGNGVVISIPLTETVVLHRGQLLGLRANKTSPTSGEGARPGGIIHVYGDDSSDRAASSFIPYCSMAQAQLCFHGHRDAVKFFVSVPGNVLATLNGSVLDSPAEGPGPAAPASEVEGQKLRNVLVLSGGEGYIDFRIGDGEDDETEEGAGDMSQVKPVLSKAERSHIIVWQVSYTPE

SEQ ID NO: 5140 - protein, 4640 aa, Homo sapiens
MPVPDGSVAAAGLGLGLPAADSPGHYQLLLSGRALADRYRRIYTAALNDRDQGGGSAGHPASRNKKILNKKKLKRKQKSKSKVKTRSKSENLENTVIIPDIKLHSNPSAFNIYCNVRHCVLEWQKKEISLAAASKNSVQSGESDSDEEEESKEPPIKLPKIIEVGLCEVFELIKETRFSHPSLCLRSLQALLNVLQGQQPEVLQSEPPEVLESLFQLLLEITVRSTGMNDSTGQSLTALSCACLFSLVASWGETGRTLQAISAILTNNGSHACQTIQVPTILNSLQRSVQAVLVGKIQIQDWFSNGIKKAALMHKWPLKEISVDEDDQCLLQNDGFFLYLLCKDGLYKIGSGYSGTVRGHIYNSTSRIRNRKEKKSWLGYAQGYLLYRDVNNHSMTAIRISPETLEQDGTVMLPDCHTEGQNILFTDGEYINQIAASRDDGFVVRIFATSTEPVLQQELQLKLARKCLHACGISLFDLEKDLHIISTGFDEESAILGAGREFALMKTANGKIYYTGKYQSLGIKQGGPSAGKWVELPITKSPKIVHFSVGHDGSHALLVAEDGSIFFTGSASKGEDGESTKSRRQSKPYKPKKIIKMEGKIVVYTACNNGSSSVISKDGELYMFGKDAIYSDSSSLVTDLKGHFVTQVAMGKAHTCVLMKNGEVWTFGVNNKGQCGRDTGAMNQGGKGFGVENMATAMDEDLEEELDEKDEKSMMCPPGMHKWKLEQCMVCTVCGDCTGYGASCVSSGRPDRVPGGICGCGSGESGCAVCGCCKACARELDGQEARQRGILDAVKEMIPLDLLLAVPVPGVNIEEHLQLRQEEKRQRVIRRHRLEEGRGPLVFAGPIFMNHREQALARLRSHPAQLKHKRDKHKDGSGERGEKDASKITTYPPGSVRFDCELRAVQVSCGFHHSVVLMENGDVYTFGYGQHGQLGHGDVNSRGCPTLVQALPGPSTQVTAGSNHTAVLLMDGQVFTFGSFSKGQLGRPILDVPYWNAKPAPMPNIGSKYGRKATWIGASGDQTFLRIDEALINSHVLATSEIFASKHIIGLVPASISEPPPFKCLLINKVDGSCKTFNDSEQEDLQGFGVCLDPVYDVIWRFRPNTRELWCYNAVVADARLPSAADMQSRCSILSPELALPTGSRALTTRSHAALHILGCLDTLAAMQDLKMGVASTEEETQAVMKVYSKEDYSVVNRFESHGGGWGYSAHSVEAIRFSADTDILLGGLGLFGGRGEYTAKIKLFELGPDGGDHETDGDLLAETDVLAYDCAAREKYAMMFDEPVLLQAGWWYVAWARVSGPSSDCGSHGQASITTDDGVVFQFKSSKKSNNGTDVNAGQIPQLLYRLPTSDGSASKGKQQTSEPVHILKRSFARTVSVECFESLLSILHWSWTTLVLGVEELRGLKGFQFTATLLDLERLRFVGTCCLRLLRVYTCEIYPVSATGKAVVEETSKLAECIGKTRTLLRKILSEGVDHCMVKLDNDPQGYLSQPLSLLEAVLQECHNTFTACFHSFYPTPALQWACLCDLLNCLDQDIQEANFKTSSSRLLAAVMSALCHTSVKLTSIFPIAYDGEVLLRSIVKQVSTENDSTLVHRFPLLVAHMEKLSQSEENISGMTSFREVLEKMLVIVVLPVRNSLRRENELFSSHLVSNTCGLLASIVSELTASALGSEVDGLNSLHSVKASANRFTKTSQGRSWNTGNGSPDAICFSVDKPGIVVVGFSVYGGGGIHEYELEVLVDDSEHAGDSTHSHRWTSLELVKGTYTTDDSPSDIAEIRLDKVVPLKENVKYAVRLRNYGSRTANGDGGMTTVQCPDGVTFTFSTCSLSSNGTNQTRGQIPQILYYRSEFDGDLQSQLLSKANEEDKNCSRALSVVSTVVRASKDLLHRALAVDADDIPELLSSSSLFSMLLPLIIAYIGPVAAAIPKVAVEVFGLVQQLLPSVAILNQKYAPPAFNPNQSTDSTTGNQPEQGLSACTTSSHYAVIESEHPYKPACVMHYKVTFPECVRWMTIEFDPQCGTAQSEDVLRLLIPVRTVQNSGYGPKLTSVHENLNSWIELKKFSGSSGWPTMVLVLPGNEALFSLETASDYVKDDKASFYGFKCFAIGYEFSPGPDEGVIQLEKELANLGGVCAAALMKKDLALPIGNELEEDLEILEEAALQVCKTHSGILGKGLALSHSPTILEALEGNLPLQIQSNEQSFLDDFIACVPGSSGGRLARWLQPDSYADPQKTSLILNKDDIRCGWPTTITVQTKDQYGDVVHVPNMKVEVKAVPVSQKKMSLQQDQAKKPQRIPGSPAVTAASSNTDMTYGGLASPKLDVSYEPMIVKEARYIAITMMKVYENYSFEELRFASPTPKRPSENMLIRVNNDGTYCANWTPGAIGLYTLHVTIDGIEIDAGLEVKVKDPPKGMIPPGTQLVKPKSEPQPNKVRKFVAKDSAGLRIRSHPSLQSEQIGIVKVNGTITFIDEIHNDDGVWLRLNDETIKKYVPNMNGYTEAWCLSFNQHLGKSLLVPVDESKTNTDDFFKDINSCCPQEATMQEQDMPFLRGGPGMYKVVKTGPSGHNIRSCPNLRGIPIGMLVLGNKVKAVGEVTNSEGTWVQLDQNSMVEFCESDEGEAWSLARDRGGNQYLRHEDEQALLDQNSQTPPPSPFSVQAFNKGASCSAQGFDYGLGNSKGDRGNISTSSKPASTSGKSELSSKHSRSLKPDGRMSRTTADQKKPRGTESLSASESLILKSDAAKLRSDSHSRSLSPNHNTLQTLKSDGRMPSSSRAESPGPGSRLSSPKPKTLPANRSSPSGASSPRSSSPHDKNLPQKSTAPVKTKLDPPRERSKSDSYTLDPDTLRKKKMPLTEPLRGRSTSPKPKSVPKDSTDSPGSENRAPSPHVVQENLHSEVVEVCTSSTLKTNSLTDSTCDDSSEFKSVDEGSNKVHFSIGKAPLKDEQEMRASPKISRKCANRHTRPKKEKSSFLFKGDGSKPLEPAKQAMSPSVAECARAVFASFLWHEGIVHDAMACSSFLKFHPELSKEHAPIRSSLNSQQPTEEKETKLKNRHSLEISSALNMFNIAPHGPDISKMGSINKNKVLSMLKEPPLHEKCEDGKTETTFEMSMHNTMKSKSPLPLTLQHLVAFWEDISLATIKAASQNMIFPSPGSCAVLKKKECEKENKKSKKEKKKKEKAEVRPRGNLFGEMAQLAVGGPEKDTICELCGESHPYPVTYHMRQAHPGCGRYAGGQGYNSIGHFCGGWAGNCGDGGIGGSTWYLVCDRCREKYLREKQAAAREKVKQSRRKPMQVKTPRALPTMEAHQVIKANALFLLSLSSAAEPSILCYHPAKPFQSQLPSVKEGISEDLPVKMPCLYLQTLARHHHENFVGYQDDNLFQDEMRYLRSTSVPAPYISVTPDASPNVFEEPESNMKSMPPSLETSPITDTDLAKRTVFQRSYSVVASEYDKQHSILPARVKAIPRRRVNSGDTEVGSSLLRHPSPELSRLISAHSSLSKGERNFQWPVLAFVIQHHDLEGLEIAMKQALRKSACRVFAMEAFNWLLCNVIQTTSLHDILWHFVASLTPAPVEPEEEEDEENKTSKENSEQEKDTRVCEHPLSDIVIAGEAAHPLPHTFHRLLQTISDLMMSLPSGSSLQQMALRCWSLKFKQSDHQFLHQSNVFHHINNILSKSDDGDSEESFSISIQSGFEAMSQELCIVMCLKDLTSIVDIKTSSRPAMIGSLTDGSTETFWESGDEDKNKTKNITINCVKGINARYVSVHVDNSRDLGNKVTSMTFLTGKAVEDLCRIKQVDLDSRHIGWVTSELPGGDNHIIKIELKGPENTLRVRQVKVLGWKDGESTKIAGQISASVAQQRNCEAETLRVFRLITSQVFGKLISGDAEPTPEQEEKALLSSPEGEEKVYNATSDADLKEHMVGIIFSRSKLTNLQKQVCAHIVQAIRMEATRVREEWEHAISSKENANSQPNDEDASSDAYCFELLSMVLALSGSNVGRQYLAQQLTLLQDLFSLLHTASPRVQRQVTSLLRRVLPEVTPSRLASIIGVKSLPPADISDIIHSTEKGDWNKLGILDMFLGCIAKALTVQLKAKGTTITGTAGTTVGKGVTTVTLPMIFNSSYLRRGESHWWMKGSTPTQISEIIIKLIKDMAAGHLSEAWSRVTKNAIAETIIALTKMEEEFRSPVRCIATTRLWLALASLCVLDQDHVDRLSSGRWMGKDGQQKQMPMCDNHDDGETAAIILCNVCGNLCTDCDRFLHLHRRTKTHQRQVFKEEEEAIKVDLHEGCGRTKLFWLMALADSKTMKAMVEFREHTGKPTTSSSEACRFCGSRSGTELSAVGSVCSDADCQEYAKIACSKTHPCGHPCGGVKNEEHCLPCLHGCDKSATSLKQDADDMCMICFTEALSAAPAIQLDCSHIFHLQCCRRVLENRWLGPRITFGFISCPICKNKINHIVLKDLLDPIKELYEDVRRKALMRLEYEGLHKSEAITTPGVRFYNDPAGYAMNRYAYYVCYKCRKAYFGGEARCDAEAGRGDDYDPRELICGACSDVSRAQMCPKHGTDFLEYKCRYCCSVAVFFCFGTTHFCNACHDDFQRMTSIPKEELPHCPAGPKGKQLEGTECPLHVVHPPTGEEFALGCGVCRNAHTF

SEQ ID NO: 5141 - protein, 181 aa, Homo sapiens
MATEPEAAEPVVPSLVDRYFTRWYKPDVKGKFCEDHCILQHSNRICVITLAESHPVLQSGKTIKSISYQISTNCSRLQNKVSGKFKRGAQFLTELAPLCKIYCSDGEEYTVSSCVRGRLMEVNENILHKPSILQEKPSTEGYIAVVLPKFEESKSITEGLLTQKQYEEVMVKRINATTATS

SEQ ID NO: 5142 - protein, 233 aa, Homo sapiens
MGEPQQVSALPPPPMQYIKEYTDENIQEGLAPKPPPPIKDSYMMFGNQFQCDDLIIRPLESQGIERLHPMQFDHKKELRKLNMSILINFLDLLDILIRSPGSIKREEKLEDLKLLFVHVHHLINEYRPHQARETLRVMMEVQKRQRLETAERFQKHLERVIEMIQNCLASLPDDLPHSEAGMRVKTEPMDADDSNNCTGQNEHQRENSGHRRDQIIEKDAALCVLIDEMNERP

SEQ ID NO: 5143 - protein, 358 aa, Homo sapiens
MAGCGEIDHSINMLPTNRKANESCSNTAPSLTVPECAICLQTCVHPVSLPCKHVFCYLCVKGASWLGKRCALCRQEIPEDFLDKPTLLSPEELKAASRGNGEYAWYYEGRNGWWQYDERTSRELEDAFSKGKKNTEMLIAGFLYVADLENMVQYRRNEHGRRRKIKRDIIDIPKKGVAGLRLDCDANTVNLARESSADGADSVSAQSGASVQPLVSSVRPLTSVDGQLTSPATPSPDASTSLEDSFAHLQLSGDNTAERSHRGEGEEDHESPSSGRVPAPDTSIEETESDASSDSEDVSAVVAQHSLTQQRLLVSNANQTVPDRSDRSGTDRSVAGGGTVSVSVRSRRPDGQCTVTEV

SEQ ID NO: 5144 - protein, 4388 aa, Homo sapiens
MLEGLVAWVLNTYLGKYVNNLNTDQLSVALLKGAVELENLPLKKDALKELELPFEVKAGFIGKVTLQIPFYRPHVDPWVISISSLHLIGAPEKIQDFNDEKEKLLERERKKALLQALEEKWKNDRQQKGESYWYSVTASVVTRIVENIELKIQDVHLRFEDGVTNPSHPFAFGICIKNVSMQNAVNEPVQKLMRKKQLDVAEFSIYWDVDCTLLGDLPQMELQEAMARSMESRSHHYVLEPVFASALLKRNCSKKPLRSRHSPRIDCDIQLETIPLKLSQLQYRQIMEFLKELERKERQVKFRRWKPKVAISKNCREWWYFALNANLYEIREQRKRCTWDFMLHRARDAVSYTDKYFNKLKGGLLSTDDKEEMCRIEEEQSFEELKILRELVHDRFHKQEELAESLREPQFDSPGACPGAPEPGGGSGMLQYLQSWFPGWGGWYGQQTPEGNVVEGLSAEQQEQWIPEEILGTEEFFDPTADASCMNTYTKRDHVFAKLNLQLQRGTVTLLHKEQGTPQMNESAFMQLEFSDVKLLAESLPRRNSSLLSVRLGGLFLRDLATEGTMFPLLVFPNPQKEVGRVSQSFGLQTTSADRSDHYPAADPDGPVFEMLYERNPAHSHFERRLNVSTRPLNIIYNPQAIKKVADFFYKGKVHTSGFGYQSELELRVAEAARRQYNKLKMQTKAEIRQTLDRLLVGDFIEESKRWTVRLDISAPQVIFPDDFKFKNPVLVVVDLGRMLLTNTQDNSRRKSRDGSASEETQFSDDEYKTPLATPPNTPPPESSSSNGEKTPPFSGVEFSEEQLQAHLMSTKMYERYSLSFMDLQIMVGRVKDNWKHVQDIDVGPTHVVEKFNVHLQLERRLIYTSDPKYPGAVLSGNLPDLKIHINEDKISALKNCFALLTTPEMKTSDTQIKEKIFPQEEQRGSLQDSVMNLTQSIVLLEQHTREVLVESQLLLAEFKVNCMQLGVESNGRYISVLKVFGTNAHFVKRPYDAEVSLTVHGLLLVDTMQTYGADFDLLMASHKNLSFDIPTGSLRDSRAQSPVSGPNVAHLTDGATLNDRSATSVSLDKILTKEQESLIKLEYQFVSSECPSMNLDSTLQVISLQVNNLDIILNPETIVELIGFLQKSFPKEKDDLSPQPLMTDFERSFREQGTYQSTYEQNTEVAVEIHRLNLLLLRTVGMANREKYGRKIATASIGGTKVNVSMGSTFDMNGSLGCLQLMDLTQDNVKNQYVVSIGNSVGYENIISDIGYFESVFVRMEDAALTEALSFTFVERSKQECFLNLKMASLHYNHSAKFLKELTLSMDELEENFRGMLKSAATKVTTVLATKTAEYSEMVSLFETPRKTREPFILEENEIYGFDLASSHLDTVKLILNINIESPVVSIPRKPGSPELLVGHLGQIFIQNFVAGDDESRSDRLQVEIKDIKLYSLNCTQLAGREAVGSEGSRMFCPPSGSGSANSQEEAHFTRHDFFESLHRGQAFHILNNTTIQFKLEKIPIERESELTFSLSPDDLGTSSIMKIEGKFVNPVQVVLAKHVYEQVLQTLDNLVYSEDLNKYPASATSSPCPDSPLPPLSTCGESSVERKENGLFSHSSLSNTSQKSLSVKEVKSFTQIQATFCISELQVQLSGDLTLGAQGLVSLKFQDFEVEFSKDHPQTLSIQIALHSLLMEDLLEKNPDSKYKNLMVSRGAPKPSSLAQKEYLSQSCPSVSNVEYPDMPRSLPSHMEEAPNVFQLYQRPTSASRKKQKEVQDKDYPLTPPPSPTVDEPKILVGKSKFDDSLVHINIFLVDKKHPEFSSSYNRVNRSIDVDFNCLDVLITLQTWVVILDFFGIGSTADNHAMRLPPEGILHNVKLEPHASMESGLQDPVNTKLDLKVHSLSLVLNKTTSELAKANVSKLVAHLEMIEGDLALQGSIGSLSLSDLTCHGEFYRERFTTSGEEALIFQTFKYGRPDPLLRREHDIRVSLRMASVQYVHTQRFQAEVVAFIQHFTQLQDVLGRQRAAIEGQTVRDQAQRCSRVLLDIEAGAPVLLIPESSRSNNLIVANLGKLKVKNKFLFAGFPGTFSLQDKESVPSASPTGIPKHSLRKTTSTEEPRGTHSQGQFTMPLAGMSLGSLKSEFVPSTSTKQQGPQPTLSVGQESSSPEDHVCLLDCVVVDLQDMDIFAAERHPREYSKAPEDSSGDLIFPSYFVRQTGGSLLTEPCRLKLQVERNLDKEISHTVPDISIHGNLSSVHCSLDLYKYKLIRGLLENNLGEPIEEFMRPYDLQDPRIHTVLSGEVYTCMCFLIDMVNVSLELKDPKRKEGAGSLARFDFKKCKLLYESFSNQTKSINLVSHSMMAFDTRYAGQKTSPGMTNVFSCIFQPAKNSSTTQGSIQIELHFRSTKDSSCFTVVLNNLRVFLIFDWLLLVHDFLHTPSDIKKQNHVTPSRHRNSSSESAIVPKTVKSGVVTKRSSLPVSNERHLEVKVNVTGTEFVVIEDVSCFDTNAIILKGTTVLTYKPRFVDRPFSGSLFGIEVFSCRLGNEHDTALSIVDPVQIQMELVGNSSYQNSSGLMDAFNSEDFPPVLEIQLQALDIRLSYNDVQLFLAIAKSIPEQANAAVPDSVALESDSVGTYLPGASRVGEEIREGTRHTLDPVLELQLARLQELGFSMDDCRKALLACQGQLKKAASWLFKNAEPLKSLSLASTSRDSPGAVAAPLISGVEIKAESVCICFIDDCMDCDVPLAELTFSRLNFLQRVRTSPEGYAHFTLSGDYYNRALSGWEPFIEPWPCSVSWQQQAASRLHPPRLKLEAKAKPRLDINITSVLIDQYVSTKESWMADYCKDDKDIESAKSEDWMGSSVDPPCFGQSLPLVYLRTRSTASLTNLEHQIYARAEVKTPKRRQPFVPFALRNHTGCTLWFATLTTTPTRAALSHSGSPGVVPEGNGTFLDDTHNVSEWREVLTGEEIPFEFEARGKLRHRHTHDLRIHQLQVRVNGWEQVSPVSVDKVGTFFRYAAPDKNSSSSTIGSPSSRTNIIHPQVYFSSLPPVRVVFAVTMEGSARKVITVRSALIVRNRLETPMELRLDSPSAPDKPVVLPAIMPGDSFAVPLHLTSWRLQARPKGLGVFFCKAPIHWTNVVKTAEISSSKRECHSMDTEKSRFFRFCVAIKKENYPDYMPSNIFSDSAKQIFRQPGHTIYLLPTVVICNLLPCELDFYVKGMPINGTLKPGKEAALHTADTSQNIELGVSLENFPLCKELLIPPGTQNYMVRMRLYDVNRRQLNLTIRIVCRAEGSLKIFISAPYWLINKTGLPLIFRQDNAKTDAAGQFEEHELARSLSPLLFCYADKEQPNLCTMRIGRGIHPEGMPGWCQGFSLDGGSGVRALKVIQQGNRPGLIYNIGIDVKKGRGRYIDTCMVIFAPRYLLDNKSSHKLAFAQREFARGQGTANPEGYISTLPGSSVVFHWPRNDYDQLLCVRLMDVPNCIWSGGFEVNKNNSFHINMRDTLGKCFFLRVEITLRGATYRISFSDTDQLPPPFRIDNFSKVPVVFTQHGVAEPRLRTEVKPMTSLDYAWDEPTLPPFITLTVKGAGSSEINCNMNDFQDNRQLYYENFIYIAATYTFSGLQEGTGRPVASNKAITCAELVLDVSPKTQRVILKKKEPGKRSQLWRMTGTGMLAHEGSSVPHNPNKPSAARSTEGSAILDIAGLAAVTDNRYEPLMLRKPDRRRSTTQTWSFREGKLTCGLHGLVVQAKGGLSGLFDGAEVVLGPDTSMELLGPVPPEQQFINQKMRPGSGMLSIRVIPDGPTRALQITDFCHRKSSRSYEVDELPVTEQELQKLKNPDTEQELEVLVRLEGGIGLSLINKVPEELVFASLTGINVHYTQLATSHMLELSIQDVQVDNQLIGTTQPFMLYVTPLSNENEVIETGPAVQVNAVKFPSKSALTNIYKHLMITAQRFTVQIEEKLLLKLLSFFGYDQAESEVEKYDENLHEKTAEQGGTPIRYYFENLKISIPQIKLSVFTSNKLPLDLKALKSTLGFPLIRFEDAVINLDPFTRVHPYETKEFIINDILKHFQEELLSQAARILGSVDFLGNPMGLLNDVSEGVTGLIKYGNVGGLIRNVTHGVSNSAAKFAGTLSDGLGKTMDNRHQSEREYIRYHAATSGEHLVAGIHGLAHGIIGGLTSVITSTVEGVKTEGGVSGFISGLGKGLVGTVTKPVAGALDFASETAQAVRDTATLSGPRTQAQRVRKPRCCTGPQGLLPRYSESQAEGQEQLFKLTDNIQDEFFIAVENIDSYCVLISSKAVYFLKSGDYVDREAIFLEVKYDDLYHCLVSKDHGKVYVQVTKKAVSTSSGVSIPGPSHQKPMVHVKSEVLAVKLSQEINYAKSLYYEQQLMLRLSENREQLELDS

SEQ ID NO: 5145 - protein, 4363 aa, Homo sapiens
MLEGLVAWVLNTYLGKYVNNLNTDQLSVALLKGAVELENLPLKKDALKELELPFEVKAGFIGKVTLQIPFYRPHVDPWVISISSLHLIGAPEKIQDFNDEKEKLLERERKKALLQALEEKWKNDRQQKGESYWYSVTASVVTRIVENIELKIQDVHLRFEDGVTNPSHPFAFGICIKNVSMQNAVNEPVQKLMRKKQLDVAEFSIYWDVDCTLLGDLPQMELQEAMARSMESRSHHYVLEPVFASALLKRNCSKKPLRSRHSPRIDCDIQLETIPLKLSQLQYRQIMEFLKELERKERQVKFRRWKPKVAISKNCREWWYFALNANLYEIREQRKRCTWDFMLHRARDAVSYTDKYFNKLKGGLLSTDDKEEMCRIEEEQSFEELKILRELVHDRFHKQEELAESLREPQFDSPGACPGAPEPGGGSGMLQYLQSWFPGWGGWYGQQTPEGNVVEGLSAEQQEQWIPEEILGTEEFFDPTADASCMNTYTKRDHVFAKLNLQLQRGTVTLLHKEQGTPQMNESAFMQLEFSDVKLLAESLPRRNSSLLSVRLGGLFLRDLATEGTMFPLLVFPNPQKEVGRVSQSFGLQTTSADRSDHYPAADPDGPVFEMLYERNPAHSHFERRLNVSTRPLNIIYNPQAIKKVADFFYKGKVHTSGFGYQSELELRVAEAARRQYNKLKMQTKAEIRQTLDRLLVGDFIEESKRWTVRLDISAPQVIFPDDFKFKNPVLVVVDLGRMLLTNTQDNSRRKSRDGSASEETQFSDDEYKTPLATPPNTPPPESSSSNGEKTPPFSGVEFSEEQLQAHLMSTKMYERYSLSFMDLQIMVGRVKDNWKHVQDIDVGPTHVVEKFNVHLQLERRLIYTSDPKYPGAVLSGNLPDLKIHINEDKISALKNCFALLTTPEMKTSDTQIKEKIFPQEEQRGSLQDSVMNLTQSIVLLEQHTREVLVESQLLLAEFKVNCMQLGVESNGRYISVLKVFGTNAHFVKRPYDAEVSLTVHGLLLVDTMQTYGADFDLLMASHKNLSFDIPTGSLRDSRAQSPVSGPNVAHLTDGATLNDRSATSVSLDKILTKEQESLIKLEYQFVSSECPSMNLDSTLQVISLQVNNLDIILNPETIVELIGFLQKSFPKEKDDLSPQPLMTDFERSFREQGTYQSTYEQNTEVAVEIHRLNLLLLRTVGMANREKYGRKIATASIGGTKVNVSMGSTFDMNGSLGCLQLMDLTQDNVKNQYVVSIGNSVGYENIISDIGYFESVFVRMEDAALTEALSFTFVERSKQECFLNLKMASLHYNHSAKFLKELTLSMDELEENFRGMLKSAATKVTTVLATKTAEYSEMVSLFETPRKTREPFILEENEIYGFDLASSHLDTVKLILNINIESPVVSIPRKPGSPELLVGHLGQIFIQNFVAGDDESRSDRLQVEIKDIKLYSLNCTQLAGREAVGSEGSRMFCPPSGSGSANSQEEAHFTRHDFFESLHRGQAFHILNNTTIQFKLEKIPIERESELTFSLSPDDLGTSSIMKIEGKFVNPVQVVLAKHVYEQVLQTLDNLVYSEDLNKYPASATSSPCPDSPLPPLSTCGESSVERKENGLFSHSSLSNTSQKSLSVKEVKSFTQIQATFCISELQVQLSGDLTLGAQGLVSLKFQDFEVEFSKDHPQTLSIQIALHSLLMEDLLEKNPDSKYKNLMVSRGAPKPSSLAQKEYLSQSCPSVSNVEYPDMPRSLPSHMEEAPNVFQLYQRPTSASRKKQKEVQDKDYPLTPPPSPTVDEPKILVGKSKFDDSLVHINIFLVDKKHPEFSSSYNRVNRSIDVDFNCLDVLITLQTWVVILDFFGIGSTADNHAMRLPPEGILHNVKLEPHASMESGLQDPVNTKLDLKVHSLSLVLNKTTSELAKANVSKLVAHLEMIEGDLALQGSIGSLSLSDLTCHGEFYRERFTTSGEEALIFQTFKYGRPDPLLRREHDIRVSLRMASVQYVHTQRFQAEVVAFIQHFTQLQDVLGRQRAAIEGQTVRDQAQRCSRVLLDIEAGAPVLLIPESSRSNNLIVANLGKLKVKNKFLFAGFPGTFSLQDKESVPSASPTGIPKHSLRKTTSTEEPRGTHSQGQFTMPLAGMSLGSLKSEFVPSTSTKQQGPQPTLSVGQESSSPEDHVCLLDCVVVDLQDMDIFAAERHPREYSKAPEDSSGDLIFPSYFVRQTGGSLLTEPCRLKLQVERNLDKEISHTVPDISIHGNLSSVHCSLDLYKYKLIRGLLENNLGEPIEEFMRPYDLQDPRIHTVLSGEVYTCMCFLIDMVNVSLELKDPKRKEGAGSLARFDFKKCKLLYESFSNQTKSINLVSHSMMAFDTRYAGQKTSPGMTNVFSCIFQPAKNSSTTQGSIQIELHFRSTKDSSCFTVVLNNLRVFLIFDWLLLVHDFLHTPSDIKKQNHVTPSRHRNSSSESAIVPKTVKSGVVTKRSSLPVSNERHLEVKVNVTGTEFVVIEDVSCFDTNAIILKGTTVLTYKPRFVDRPFSGSLFGIEVFSCRLGNEHDTALSIVDPVQIQMELVGNSSYQNSSGLMDAFNSEDFPPVLEIQLQALDIRLSYNDVQLFLAIAKSIPEQANAAVPDSVALESDSVGTYLPGASRVGEEIREGTRHTLDPVLELQLARLQELGFSMDDCRKALLACQGQLKKAASWLFKNAEPLKSLSLASTSRDSPGAVAAPLISGVEIKAESVCICFIDDCMDCDVPLAELTFSRLNFLQRVRTSPEGYAHFTLSGDYYNRALSGWEPFIEPWPCSVSWQQQAASRLHPPRLKLEAKAKPRLDINITSVLIDQYVSTKESWMADYCKDDKDIESAKSEDWMGSSVDPPCFGQTEVKTPKRRQPFVPFALRNHTGCTLWFATLTTTPTRAALSHSGSPGVVPEGNGTFLDDTHNVSEWREVLTGEEIPFEFEARGKLRHRHTHDLRIHQLQVRVNGWEQVSPVSVDKVGTFFRYAAPDKNSSSSTIGSPSSRTNIIHPQVYFSSLPPVRVVFAVTMEGSARKVITVRSALIVRNRLETPMELRLDSPSAPDKPVVLPAIMPGDSFAVPLHLTSWRLQARPKGLGVFFCKAPIHWTNVVKTAEISSSKRECHSMDTEKSRFFRFCVAIKKENYPDYMPSNIFSDSAKQIFRQPGHTIYLLPTVVICNLLPCELDFYVKGMPINGTLKPGKEAALHTADTSQNIELGVSLENFPLCKELLIPPGTQNYMVRMRLYDVNRRQLNLTIRIVCRAEGSLKIFISAPYWLINKTGLPLIFRQDNAKTDAAGQFEEHELARSLSPLLFCYADKEQPNLCTMRIGRGIHPEGMPGWCQGFSLDGGSGVRALKVIQQGNRPGLIYNIGIDVKKGRGRYIDTCMVIFAPRYLLDNKSSHKLAFAQREFARGQGTANPEGYISTLPGSSVVFHWPRNDYDQLLCVRLMDVPNCIWSGGFEVNKNNSFHINMRDTLGKCFFLRVEITLRGATYRISFSDTDQLPPPFRIDNFSKVPVVFTQHGVAEPRLRTEVKPMTSLDYAWDEPTLPPFITLTVKGAGSSEINCNMNDFQDNRQLYYENFIYIAATYTFSGLQEGTGRPVASNKAITCAELVLDVSPKTQRVILKKKEPGKRSQLWRMTGTGMLAHEGSSVPHNPNKPSAARSTEGSAILDIAGLAAVTDNRYEPLMLRKPDRRRSTTQTWSFREGKLTCGLHGLVVQAKGGLSGLFDGAEVVLGPDTSMELLGPVPPEQQFINQKMRPGSGMLSIRVIPDGPTRALQITDFCHRKSSRSYEVDELPVTEQELQKLKNPDTEQELEVLVRLEGGIGLSLINKVPEELVFASLTGINVHYTQLATSHMLELSIQDVQVDNQLIGTTQPFMLYVTPLSNENEVIETGPAVQVNAVKFPSKSALTNIYKHLMITAQRFTVQIEEKLLLKLLSFFGYDQAESEVEKYDENLHEKTAEQGGTPIRYYFENLKISIPQIKLSVFTSNKLPLDLKALKSTLGFPLIRFEDAVINLDPFTRVHPYETKEFIINDILKHFQEELLSQAARILGSVDFLGNPMGLLNDVSEGVTGLIKYGNVGGLIRNVTHGVSNSAAKFAGTLSDGLGKTMDNRHQSEREYIRYHAATSGEHLVAGIHGLAHGIIGGLTSVITSTVEGVKTEGGVSGFISGLGKGLVGTVTKPVAGALDFASETAQAVRDTATLSGPRTQAQRVRKPRCCTGPQGLLPRYSESQAEGQEQLFKLTDNIQDEFFIAVENIDSYCVLISSKAVYFLKSGDYVDREAIFLEVKYDDLYHCLVSKDHGKVYVQVTKKAVSTSSGVSIPGPSHQKPMVHVKSEVLAVKLSQEINYAKSLYYEQQLMLRLSENREQLELDS

SEQ ID NO: 5146 - protein, 657 aa, Homo sapiens
MSQVLFHQLVPLQVKCKDCEERRVSIRMSIELQSVSNPVHRKDLVIRLTDDTDPFFLYNLVISEEDFQSLKFQQGLLVDFLAFPQKFIDLLQQCTQEHAKEIPRFLLQLVSPAAILDNSPAFLNVVETNPFKHLTHLSLKLLPGNDVEIKKFLAGCLKCSKEEKLSLMQSLDDATKQLDFTRKTLAEKKQELDKLRNEWASHTAALTNKHSQELTNEKEKALQAQVQYQQQHEQQKKDLEILHQQNIHQLQNRLSELEAANKDLTERKYKGDSTIRELKAKLSGVEEELQRTKQEVLSLRRENSTLDVECHEKEKHVNQLQTKVAVLEQEIKDKDQLVLRTKEAFDTIQEQKVVLEENGEKNQVQLGKLEATIKSLSAELLKANEIIKKLQGDLKTLMGKLKLKNTVTIQQEKLLAEKEEKLQKEQKELQDVGQSLRIKEQEVCKLQEQLEATVKKLEESKQLLKNNEKLITWLNKELNENQLVRKQDVLGPSTTPPAHSSSNTIRSGISPNLNVVDGRLTYPTCGIGYPVSSAFAFQNTFPHSISAKNTSHPGSGTKVQFNLQFTKPNASLGDVQSGATISMPCSTDKENGENVGLESKYLKKREDSIPLRGLSQNLFSNSDHQRDGTLGALHTSSKPTALPSASSAYFPGQLPNS

SEQ ID NO: 5147 - protein, 523 aa, Homo sapiens
MTQNKLKLCSKANVYTEVPDGGWGWAVAVSFFFVEVFTYGIIKTFGVFFNDLMDSFNESNSRISWIISICVFVLTFSAPLATVLSNRFGHRLVVMLGGLLVSTGMVAASFSQEVSHMYVAIGIISGLGYCFSFLPTVTILSQYFGKRRSIVTAVASTGECFAVFAFAPAIMALKERIGWRYSLLFVGLLQLNIVIFGALLRPIFIRGPASPKIVIQENRKEAQYMLENEKTRTSIDSIDSGVELTTSPKNVPTHTNLELEPKADMQQVLVKTSPRPSEKKAPLLDFSILKEKSFICYALFGLFATLGFFAPSLYIIPLGISLGIDQDRAAFLLSTMAIAEVFGRIGAGFVLNREPIRKIYIELICVILLTVSLFAFTFATEFWGLMSCSIFFGFMVGTIGGTHIPLLAEDDVVGIEKMSSAAGVYIFIQSIAGLAGPPLAGLLVDQSKIYSRAFYSCAAGMALAAVCLALVRPCKMGLCQHHHSGETKVVSHRGKTLQDIPEDFLEMDLAKNEHRVHVQMEPV

SEQ ID NO: 5148 - protein, 336 aa, Homo sapiens
MLDTKWKGKSVVVLRHPLINPVAFGALLQYLYTGRLDIGVEHVSDCERLAKQCQLWDLLSDLEAKCEKVSEFVASKPGTCVKVLTIEPPPADPRLREDMALLADCALPPELRGDLWELPFPCPDGFNSCPDICFRVAGCSFLCHKAFFCGRSDYFRALLDDHFRESEEPATSGGPPAVTLHGISPDVFTHVLYYMYSDHTELSPEAAYDVLSVADMYLLPGLKRLCGRSLAQMLDEDTVVGVWRVAKLFRLARLEDQCTEYMAKVIEKLVEREDFVEAVKEEAAAVAARQETDSIPLVDDIRFHVASTVQTYSAIEEAQQRLRALEDLLVSIGLDC

SEQ ID NO: 5149 - protein, 478 aa, Homo sapiens
MDTSDLFASCRKGDVGRVRYLLEQRDVEVNVRDKWDSTPLYYACLCGHEELVLYLLANGARCEANTFDGERCLYGALSDPIRRALRDYKQVTASCRRRDYYDDFLQRLLEQGIHSDVVFVVHGKPFRVHRCVLGARSAYFANMLDTKWKGKSVVVLRHPLINPVAFGALLQYLYTGRLDIGVEHVSDCERLAKQCQLWDLLSDLEAKCEKVSEFVASKPGTCVKVLTIEPPPADPRLREDMALLADCALPPELRGDLWELPFPCPDGFNSCPDICFRVAGCSFLCHKAFFCGRSDYFRALLDDHFRESEEPATSGGPPAVTLHGISPDVFTHVLYYMYSDHTELSPEAAYDVLSVADMYLLPGLKRLCGRSLAQMLDEDTVVGVWRVAKLFRLARLEDQCTEYMAKVIEKLVEREDFVEAVKEEAAAVAARQETDSIPLVDDIRFHVASTVQTYSAIEEAQQRLRALEDLLVSIGLDC

SEQ ID NO: 5150 - protein, 453 aa, Homo sapiens
MWAECGTCWSSETWRYYACLCGHEELVLYLLANGARCEANTFDGERCLYGALSDPIRRALRDYKQVTASCRRRDYYDDFLQRLLEQGIHSDVVFVVHGKPFRVHRCVLGARSAYFANMLDTKWKGKSVVVLRHPLINPVAFGALLQYLYTGRLDIGVEHVSDCERLAKQCQLWDLLSDLEAKCEKVSEFVASKPGTCVKVLTIEPPPADPRLREDMALLADCALPPELRGDLWELPFPCPDGFNSCPDICFRVAGCSFLCHKAFFCGRSDYFRALLDDHFRESEEPATSGGPPAVTLHGISPDVFTHVLYYMYSDHTELSPEAAYDVLSVADMYLLPGLKRLCGRSLAQMLDEDTVVGVWRVAKLFRLARLEDQCTEYMAKVIEKLVEREDFVEAVKEEAAAVAARQETDSIPLVDDIRFHVASTVQTYSAIEEAQQRLRALEDLLVSIGLDC

SEQ ID NO: 5151 - protein, 155 aa, Homo sapiens
MMSTEQMQPLEVSEDRLDKLDPRCSHLDDLSDQFIKDCDLKKKPRKGKNVQATLNVESDQKKPRRKDTPALHIPPFIPGVFSEHLIKRYDVQERHPKGKMIPVLHNTDLEQKKPRRKDTPALHMSPFAAGVTLLRDERPKAIVEDDEKDGDKIAI

SEQ ID NO: 5152 - protein, 270 aa, Homo sapiens
MGNTSSERAALERHGGHKTPRRDSSGGTKDGDRPKILMDSPEDADLFHSEEIKAPEKEEFLAWQHDLEVNDKAPAQARPTVFRWTGGGKEVYLSGSFNNWSKLPLTRSHNNFVAILDLPEGEHQYKFFVDGQWTHDPSEPIVTSQLGTVNNIIQVKKTDFEVFDALMVDSQKCSDVSELSSSPPGPYHQEPYVCKPEERFRAPPILPPHLLQVILNKDTGISCDPALLPEPNHVMLNHLYALSIKDGVMVLSATHRYKKKYVTTLLYKPI

SEQ ID NO: 5153 - protein, 261 aa, Homo sapiens
MLRVLCLLRPWRPLRARGCASDGAAGGSEIQVRALAGPDQGITEILMNRPSARNALGNVFVSELLETLAQLREDRQVRVLLFRSGVKGAFCAGADLKEREQMSEAEVGVFVQRLRGLMNDIASSAVMGLIETTRGLLPGAGGTQRLPRCLGVALAKELIFTGRRLSGTEAHVLGLVNHAVAQNEEGDAAYQRARALAQEILPQAPIAVRLGKVAINRGTEVDIASGMAIEGMCYAQNIPTRDRLEGMAAFREKRTPKFVGK

SEQ ID NO: 5154 - protein, 244 aa, Homo sapiens
MFRRKLTALDYHNPAGFNCKDETEFRNFIVWLEDQKIRHYKIEDRGNLRNIHSSDWPKFFEKYLRDVNCPFKIQDRQEAIDWLLGLAVRLEYGDNAEKYKDLVPDNSKTADNATKNAEPLINLDVNNPDFKAGVMALANLLQIQRHDDYLVMLKAIRILVQERLTQDAVAKANQTKEGLPVALDKHILGFDTGDAVLNEAAQILRLLHIEELRELQTKINEAIVAVQAIIADPKTDHRLGKVGR

SEQ ID NO: 5155 - protein, 651 aa, Homo sapiens
MADSAELKQMVMSLRVSELQVLLGYAGRNKHGRKHELLTKALHLLKAGCSPAVQMKIKELYRRRFPQKIMTPADLSIPNVHSSPMPATLSPSTIPQLTYDGHPASSPLLPVSLLGPKHELELPHLTSALHPVHPDIKLQKLPFYDLLDELIKPTSLASDNSQRFRETCFAFALTPQQVQQISSSMDISGTKCDFTVQVQLRFCLSETSCPQEDHFPPNLCVKVNTKPCSLPGYLPPTKNGVEPKRPSRPINITSLVRLSTTVPNTIVVSWTAEIGRNYSMAVYLVKQLSSTVLLQRLRAKGIRNPDHSRALIKEKLTADPDSEIATTSLRVSLLCPLGKMRLTIPCRALTCSHLQCFDATLYIQMNEKKPTWVCPVCDKKAPYEHLIIDGLFMEILKYCTDCDEIQFKEDGTWAPMRSKKEVQEVSASYNGVDGCLSSTLEHQVASHHQSSNKNKKVEVIDLTIDSSSDEEEEEPSAKRTCPSLSPTSPLNNKGILSLPHQASPVSRTPSLPAVDTSYINTSLIQDYRHPFHMTPMPYDLQGLDFFPFLSGDNQHYNTSLLAAAAAAVSDDQDLLHSSRFFPYTSSQMFLDQLSAGGSTSLPTTNGSSSGSNSSLVSSNSLRESHSHTVTNRSSTDTASIFGIIPDIISLD

SEQ ID NO: 5156 - protein, 456 aa, Homo sapiens
MNSSDEEKQLQLITSLKEQAIGEYEDLRAENQKTKEKCDKIRQERDEAVKKLEEFQKISHMVIEEVNFMQNHLEIEKTCRESAEALATKLNKENKTLKRISMLYMAKLGPDVITEEINIDDEDSTTDTDGAAETCVSVQCQKQIKELRDQIVSVQEEKKILAIELENLKSKLVEVIEEVNKVKQEKTVLNSEVLEQRKVLEKCNRVSMLAVEEYEEMQVNLELEKDLRKKAESFAQEMFIEQNKLKRQSHLLLQSSIPDQQLLKALDENAKLTQQLEEERIQHQQKVKELEEQLENETLHKEIHNLKQQLELLEEDKKELELKYQNSEEKARNLKHSVDELQKRVNQSENSVPPPPPPPPPLPPPPPNPIRSLMSMIRKRSHPSGSGAKKEKATQPETTEEVTDLKRQAVEEMMDRIKKGVHLRPVNQTARPKTKPESSKGCESAVDELKGILASQ

SEQ ID NO: 5157 - protein, 250 aa, Homo sapiens
MTLSPLLLFLPPLLLLLDVPTAAVQASPLQALDFFGNGPPVNYKTGNLYLRGPLKKSNAPLVNVTLYYEALCGGCRAFLIRELFPTWLLVMEILNVTLVPYGNAQEQNVSGRWEFKCQHGEEECKFNKVEACVLDELDMELAFLTIVCMEEFEDMERSLPLCLQLYAPGLSPDTIMECAMGDRGMQLMHANAQRTDALQPPHEYVPWVTVNGKPLEDQTQLLTLVCQLYQGKKPDVCPSSTSSLRSVCFK

SEQ ID NO: 5158 - protein, 115 aa, Homo sapiens
MQVMNLNVPMRPGILVQRQSKEVLATPLENRRDMEAEEENQINEKQEPENAGETGQEEDDGLQKIHTSVTRTPSVVESQKRPLKGVTFSREVIVVDLGNEYPTPRSYTREHKERK

SEQ ID NO: 5159 - protein, 115 aa, Homo sapiens; identical to SEQ ID NO: 5158

SEQ ID NO: 5160 - protein, 166 aa, Homo sapiens
MASGVAVSDGVIKVFNDMKVRKSSTPEEVKKRKKAVLFCLSEDKKNIILEEGKEILVGDVGQTVDDPYATFVKMLPDKDCRYALYDATYETKESKKEDLVFIFWAPESAPLKSKMIYASSKDAIKKKLTGIKHELQANCYEEVKDRCTLAEKLGGSAVISLEGKPL

SEQ ID NO: 5161 - protein, 669 aa, Homo sapiens
MARRGWRRAPLRRGVGSSPRARRLMRPLWLLLAVGVFDWAGASDGGGGEARAMDEEIVSEKQAEESHRQDSANLLIFILLLTLTILTIWLFKHRRARFLHETGLAMIYGLLVGLVLRYGIHVPSDVNNVTLSCEVQSSPTTLLVTFDPEVFFNILLPPIIFYAGYSLKRRHFFRNLGSILAYAFLGTAISCFVIGSIMYGCVTLMKVTGQLAGDFYFTDCLLFGAIVSATDPVTVLAIFHELQVDVELYALLFGESVLNDAVAIVLSSSIVAYQPAGDNSHTFDVTAMFKSIGIFLGIFSGSFAMGAATGVVTALVTKFTKLREFQLLETGLFFLMSWSTFLLAEAWGFTGVVAVLFCGITQAHYTYNNLSTESQHRTKQLFELLNFLAENFIFSYMGLTLFTFQNHVFNPTFVVGAFVAIFLGRAANIYPLSLLLNLGRRSKIGSNFQHMMMFAGLRGAMAFALAIRDTATYARQMMFSTTLLIVFFTVWVFGGGTTAMLSCLHIRVGVDSDQEHLGVPENERRTTKAESAWLFRMWYNFDHNYLKPLLTHSGPPLTTTLPACCGPIARCLTSPQAYENQEQLKDDDSDLILNDGDISLTYGDSTVNTEPATSSAPRRFMGNSSEDALDRELAFGDHELVIRGTRLVLPMDDSEPPLNLLDNTRHGPA

SEQ ID NO: 5162 - protein, 503 aa, Homo sapiens
MAEDWLDCPALGPGWKRREVFRKSGATCGRSDTYYQSPTGDRIRSKVELTRYLGPACDLTLFDFKQGILCYPAPKAHPVAVASKKRKKPSRPAKTRKRQVGPQSGEVRKEAPRDETKADTDTAPASFPAPGCCENCGISFSGDGTQRQRLKTLCKDCRAQRIAFNREQRMFKRVGCGECAACQVTEDCGACSTCLLQLPHDVASGLFCKCERRRCLRIVERSRGCGVCRGCQTQEDCGHCPICLRPPRPGLRRQWKCVQRRCLRGKHARRKGGCDSKMAARRRPGAQPLPPPPPSQSPEPTEPHPRALAPSPPAEFIYYCVDEDELKRLLPSVWSESEDGAGSPPPYRRRKRPSSARRHHLGPTLKPTLATRTAQPDHTQAPTKQEAGGGFVLPPPGTDLVFLREGASSPVQVPGPVAASTEALLQAVDPGLPSVKQEPPDPEEDKEENKDDSASKLAPEEEAGGAGTPVITEIFSLGGTRFRDTAVWLPRSKDLKKPGARKQ

SEQ ID NO: 5163 - protein, 549 aa, Homo sapiens
MAEDWLDCPALGPGWKRREVFRKSGATCGRSDTYYQSPTGDRIRSKVELTRYLGPACDLTLFDFKQGILCYPAPKAHPVAVASKKRKKPSRPAKTRKRQVGPQSGEVRKEAPRDETKADTDTAPASFPAPGCCENCGISFSGDGTQRQRLKTLCKDCRAQRIAFNREQRMFKRVGCGECAACQVTEDCGACSTCLLQLPHDVASGLFCKCERRRCLRIVERSRGCGVCRGCQTQEDCGHCPICLRPPRPGLRRQWKCVQRRCLRGKHARRKGGCDSKMAARRRPGAQPLPPPPPSQSPEPTEPHPRALAPSPPAEFIYYCVDEDELQRLLPSVWSESEDGAGSPPPYRRRKRPSSARRHHLGPTLKPTLATRTAQPDHTQAPTKQEAGGGFVLPPPGTDLVFLREGASSPVQVPGPVAASTEALLQEAQCSGLSWVVALPQVKQEKADTQDEWTPGTAVLTSPVLVPGCPSKAVDPGLPSVKQEPPDPEEDKEENKDDSASKLAPEEEAGGAGTPVITEIFSLGGTRFRDTAVWLPRSKDLKKPGARKQ

SEQ ID NO: 5164 - protein, 586 aa, Homo sapiens
MAEDWLDCPALGPGWKRREVFRKSGATCGRSDTYYQSPTGDRIRSKVELTRYLGPACDLTLFDFKQGILCYPAPKAHPVAVASKKRKKPSRPAKTRKRQVGPQSGEVRKEAPRDETKADTDTAPASFPAPGCCENCGISFSGDGTQRQRLKTLCKDCRAQRIAFNREQRMFKRVGCGECAACQVTEDCGACSTCLLQLPHDVASGLFCKCERRRCLRIVERSRGCGVCRGCQTQEDCGHCPICLRPPRPGLRRQWKCVQRRCLRGKHARRKGGCDSKMAARRRPGAQPLPPPPPSQSPEPTEPQPYTNRRQNRKCGACAACLRRMDCGRCDFCCDKPKFGGSNQKRQKCRWRQCLQFAMKRLLPSVWSESEDGAGSPPPYRRRKRPSSARRHHLGPTLKPTLATRTAQPDHTQAPTKQEAGGGFVLPPPGTDLVFLREGASSPVQVPGPVAASTEALLQAVDPGLPSVKQEPPDPEEDKEENKDDSASKLAPEEEAGGAGTPVITEIFSLGGTRFRDTAVWLPSLQGRHSGREDGCKVWETEDTVEPTSTSWNPRGWPGTHVSLSPPPASMMWVSCRRSWCPSSQS

SEQ ID NO: 5165 - protein, 605 aa, Homo sapiens
MAEDWLDCPALGPGWKRREVFRKSGATCGRSDTYYQSPTGDRIRSKVELTRYLGPACDLTLFDFKQGILCYPAPKAHPVAVASKKRKKPSRPAKTRKRQVGPQSGEVRKEAPRDETKADTDTAPASFPAPGCCENCGISFSGDGTQRQRLKTLCKDCRAQRIAFNREQRMFKRVGCGECAACQVTEDCGACSTCLLQLPHDVASGLFCKCERRRCLRIVERSRGCGVCRGCQTQEDCGHCPICLRPPRPGLRRQWKCVQRRCLRGKHARRKGGCDSKMAARRRPGAQPLPPPPPSQSPEPTEPHPRALAPSPPAEFIYYCVDEDELQPYTNRRQNRKCGACAACLRRMDCGRCDFCCDKPKFGGSNQKRQKCRWRQCLQFAMKRLLPSVWSESEDGAGSPPPYRRRKRPSSARRHHLGPTLKPTLATRTAQPDHTQAPTKQEAGGGFVLPPPGTDLVFLREGASSPVQVPGPVAASTEALLQEAQCSGLSWVVALPQVKQEKADTQDEWTPGTAVLTSPVLVPGCPSKAVDPGLPSVKQEPPDPEEDKEENKDDSASKLAPEEEAGGAGTPVITEIFSLGGTRFRDTAVWLPRSKDLKKPGARKQ

SEQ ID NO: 5166 - protein, 556 aa, Homo sapiens
MAEDWLDCPALGPGWKRREVFRKSGATCGRSDTYYQSPTGDRIRSKVELTRYLGPACDLTLFDFKQGILCYPAPKAHPVAVASKKRKKPSRPAKTRKRQVGPQSGEVRKEAPRDETKADTDTAPASFPAPGCCENCGISFSGDGTQRQRLKTLCKDCRAQRIAFNREQRMFKSRGCGVCRGCQTQEDCGHCPICLRPPRPGLRRQWKCVQRRCLRGKHARRKGGCDSKMAARRRPGAQPLPPPPPSQSPEPTEPHPRALAPSPPAEFIYYCVDEDELQPYTNRRQNRKCGACAACLRRMDCGRCDFCCDKPKFGGSNQKRQKCRWRQCLQFAMKRLLPSVWSESEDGAGSPPPYRRRKRPSSARRHHLGPTLKPTLATRTAQPDHTQAPTKQEAGGGFVLPPPGTDLVFLREGASSPVQVPGPVAASTEALLQEAQCSGLSWVVALPQVKQEKADTQDEWTPGTAVLTSPVLVPGCPSKAVDPGLPSVKQEPPDPEEDKEENKDDSASKLAPEEEAGGAGTPVITEIFSLGGTRFRDTAVWLPRSKDLKKPGARKQ

SEQ ID NO: 5167 - protein, 195 aa, Homo sapiens
MGSQSSKAPRGDVTAEEAAGASPAKANGQENGHVKSNGDLSPKGEGESPPVNGTDEAAGATGDAIEPAPPSQGAEAKGEVPPKETPKKKKKFSFKKPFKLSGLSFKRNRKEGGGDSSASSPTEEEQEQGEIGACSDEGTAQEGKAAATPESQEPQAKGAEASAASEEEAGPQATEPSTPSGPESGPTPASAEQNE

SEQ ID NO: 5168 - protein, 260 aa, Homo sapiens
MARPHPWWLCVLGTLVGLSATPAPKSCPERHYWAQGKLCCQMCEPGTFLVKDCDQHRKAAQCDPCIPGVSFSPDHHTRPHCESCRHCNSGLLVRNCTITANAECACRNGWQCRDKECTECDPLPNPSLTARSSQALSPHPQPTHLPYVSEMLEARTAGHMQTLADFRQLPARTLSTHWPPQRSLCSSDFIRILVIFSGMFLVFTLAGALFLHQRRKYRSNKGESPVEPAEPCRYSCPREEEGSTIPIQEDYRKPEPACSP

SEQ ID NO: 5169 - protein, 560 aa, Homo sapiens
MELENIVANTVLLKAREGGGGNRKGKSKKWRQMLQFPHISQCEELRLSLERDYHSLCERQPIGRLLFREFCATRPELSRCVAFLDGVAEYEVTPDDKRKACGRQLTQNFLSHTGPDLIPEVPRQLVTNCTQRLEQGPCKDLFQELTRLTHEYLSVAPFADYLDSIYFNRFLQWKWLERQPVTKNTFRQYRVLGKGGFGEVCACQVRATGKMYACKKLEKKRIKKRKGEAMALNEKQILEKVNSRFVVSLAYAYETKDALCLVLTLMNGGDLKFHIYHMGQAGFPEARAVFYAAEICCGLEDLHRERIVYRDLKPENILLDDHGHIRISDLGLAVHVPEGQTIKGRVGTVGYMAPEVVKNERYTFSPDWWALGCLLYEMIAGQSPFQQRKKKIKREEVERLVKEVPEEYSERFSPQARSLCSQLLCKDPAERLGCRGGSAREVKEHPLFKKLNFKRLGAGMLEPPFKPDPQAIYCKDVLDIEQFSTVKGVELEPTDQDFYQKFATGSVPIPWQNEMVETECFQELNVFGLDGSVPPDLDWKGQPPAPPKKGLLQRLFSRQR

SEQ ID NO: 5170 - protein, 576 aa, Homo sapiens
MELENIVANTVLLKAREGGGGNRKGKSKKWRQMLQFPHISQCEELRLSLERDYHSLCERQPIGRLLFREFCATRPELSRCVAFLDGVAEYEVTPDDKRKACGRQLTQNFLSHTGPDLIPEVPRQLVTNCTQRLEQGPCKDLFQELTRLTHEYLSVAPFADYLDSIYFNRFLQWKWLERQPVTKNTFRQYRVLGKGGFGEVCACQVRATGKMYACKKLEKKRIKKRKGEAMALNEKQILEKVNSRFVVSLAYAYETKDALCLVLTLMNGGDLKFHIYHMGQAGFPEARAVFYAAEICCGLEDLHRERIVYRDLKPENILLDDHGHIRISDLGLAVHVPEGQTIKGRVGTVGYMAPEVVKNERYTFSPDWWALGCLLYEMIAGQSPFQQRKKKIKREEVERLVKEVPEEYSERFSPQARSLCSQLLCKDPAERLGCRGGSAREVKEHPLFKKLNFKRLGAGMLEPPFKPDPQAIYCKDVLDIEQFSTVKGVELEPTDQDFYQKFATGSVPIPWQNEMVETECFQELNVFGLDGSVPPDLDWKGQPPAPPKKGLLQRLFSRQDCCGNCSDSEEELPTRL

SEQ ID NO: 5171 - protein, 589 aa, Homo sapiens
MELENIVANTVLLKAREGGGGNRKGKSKKWRQMLQFPHISQCEELRLSLERDYHSLCERQPIGRLLFREFCATRPELSRCVAFLDGVAEYEVTPDDKRKACGRQLTQNFLSHTGPDLIPEVPRQLVTNCTQRLEQGPCKDLFQELTRLTHEYLSVAPFADYLDSIYFNRFLQWKWLERQPVTKNTFRQYRVLGKGGFGEVCACQVRATGKMYACKKLEKKRIKKRKGEAMALNEKQILEKVNSRFVVSLAYAYETKDALCLVLTLMNGGDLKFHIYHMGQAGFPEARAVFYAAEICCGLEDLHRERIVYRDLKPENILLDDHGHIRISDLGLAVHVPEGQTIKGRVGTVGYMAPEVVKNERYTFSPDWWALGCLLYEMIAGQSPFQQRKKKIKREEVERLVKEVPEEYSERFSPQARSLCSQLLCKDPAERLGCRGGSAREVKEHPLFKKLNFKRLGAGMLEPPFKPDPQAIYCKDVLDIEQFSTVKGVELEPTDQDFYQKFATGSVPIPWQNEMVETECFQELNVFGLDGSVPPDLDWKGQPPAPPKKGLLQRLFSRQRIAVETAATARKSSPPASSPQPEAPTSSWR

SEQ ID NO: 5172 - protein, 279 aa, Homo sapiens
MTKNEKKSLNQSLAEWKLFIYNPTTGEFLGRTAKSWGLILLFYLVFYGFLAALFSFTMWVMLQTLNDEVPKYRDQIPSPGLMVFPKPVTALEYTFSRSDPTSYAGYIEDLKKFLKPYTLEEQKNLTVCPDGALFEQKGPVYVACQFPISLLQACSGMNDPDFGYSQGNPCILVKMNRIIGLKPEGVPRIDCVSKNEDIPNVAVYPHNGMIDLKYFPYYGKKLHVGYLQPLVAVQVSFAPNNTGKEVTVECKIDGSANLKSQDDRDKFLGRVMFKITARA

SEQ ID NO: 5173 - protein, 103 aa, Homo sapiens
MAHYKAADSKREQFRRYLEKSGVLDTLTKVLVALYEEPEKPNSALDFLKHHLGAATPENPEIELLRLELAEMKEKYEAIVEENKKLKAKLAQYEPPQEEKRAE

SEQ ID NO: 5174 - protein, 669 aa, Homo sapiens
MAIVQTLPVPLEPAPEAATAPQAPVMGSVSSLISGRPCPGGPAPPRHHGPPGPTFFRQQDGLLRGGYEAQEPLCPAVPPRKAVPVTSFTYINEDFRTESPPSPSSDVEDAREQRAHNAHLRGPPPKLIPVSGKLEKNMEKILIRPTAFKPVLPKPRGAPSLPSFMGPRATGLSGSQGSLTQLFGGPASSSSSSSSSSAADKPLAFSGWASGCPSGTLSDSGRNSLSSLPTYSTGGAEPTTSSPGGHLPSHGSGRGALPGPARGVPTGPSHSDSGRSSSSKSTGSLGGRVAGGLLGSGTRASPDSSSCGERSPPPPPPPPSDEALLHCVLEGKLRDREAELQQLRDSLDENEATMCQAYEERQRHWQREREALREDCAAQAQRAQRAQQLLQLQVFQLQQEKRQLQDDFAQLLQEREQLERRCATLEREQRELGPRLEETKWEVCQKSGEISLLKQQLKESQAELVQKGSELVALRVALREARATLRVSEGRARGLQEAARARELELEACSQELQRHRQEAEQLREKAGQLDAEAAGLREPPVPPATADPFLLAESDEAKVQRAAAGVGGSLRAQVERLRVELQRERRRGEEQRDSFEGERLAWQAEKEQVIRYQKQLQHNYIQMYRRNRQLEQELQQLSLELEARELADLGLAEQAPCICLEEITATEI

SEQ ID NO: 5175 - protein, 1315 aa, Homo sapiens
MNFLSTAESRTAQAAASGTTLLPQFRAPSWQTGMHSSAATELFATGPLPSTGTLPPSLSAYQHPTTFSNRNFATTSPLVLQDSTFNTTSNGILSHHDPLLQIKTSQGTVPTALAFERLGSSVLSNSIPPQSSTYRSAQESAPHLLQPQFSLLPSALGGSQQTPQAYSSTLFTSSTASIERALLRECSVIKHHQRPSGTQSIQAQLTGSQHSLHSYLSNSSVVNFQETTRQSSLSCSPIGDSTQNLPDSSPTQNYISMHSSQNVQTQESSSPQSQKFLPAVQSSSFASSTHCQTLQNNITSPDPKSYAERKLDSDVYPSSKQEDGFPMQELQVLQPQASLESSTQRLSDGEINAQESTYKVSKADDRYSQSVIRSNSRLEDQVIGVALQASKKEESVVGSVTQLNQQIGQVNNAATLDLKNSTNLIQTPQIRLNTKDLKQQHPLILKVHESKVQEQHDQIINASSQIQIPNHALGHGHQASLPNTQVLLDSACDLQILQQSILQAGLGQVKASLQAQRVQSPQQIVHPFLQMEGHVIQSNGDHSQQQLHPQNSEVMKMDLSESSKPLQQHLTTKGHFSETNQHDSKNQFVSLGSMCFPEAVLLSDERNILSNVDDILAATAAACGVTPTDFSKSTSNETMQAVEDGDSKSHFQQSLDVRHVTSDFNSMTATVGKPQNINDTSLNGNQVTVNLSPVPALQSKMTLDQQHIETPGQNIPTKVTSAVVGPSHEVQEQSSGPFKKQSATNLESEEDSEAPVDSTLNNNRNQEFVSSSRSISGESATSESEFTLGGDDSGVSMNPARSALALLAMAQSGDAVSVKIEEENQDLMHFNLQKKRAKGKGQVKEEDNSNQKQLKRPAQGKRQNPRGTDIYLPYTPPSSESCHDGYQHQEKMRQKIKEVEEKQPEVKTGFIASFLDFLKSGPKQQFSTLAVRMPNRTRRPGTQMVRTFCPPPLPKPSSTTPTPLVSETGGNSPSDKVDNELKNLEHLSSFSSDEDDPGYSQDAYKSVSTPLTTLDATSDKKKKTEALQVATTSPTANTTGTATTSSTTVGAVKQEPLHSTSYAVNILENISSSESSKPIELDGLPSDQFAKGQDTVAIEGFTDEEDTESGGEGQYRERDEFVVKIEDIETFKEALKTGKEPPAIWKVQKALLQKFVPEIRDGQREFAATNSYLGYFGDAKSKYKRIYVKFIENANKKEYVRVCSKKPRNKPSQTIRTVQAKPSSSSKTSDPLASKTTTTKAPSVKPKVKQPKVKAEPPPKKRKKWKEEFSSSQSDSSPEIHTSSSDDEEFEPPAPFVTRFLNTRAMKETFKSYME

SEQ ID NO: 5176 - protein, 491 aa, Homo sapiens
MPLPVQVFNLQGAVEPMQIDVDPQEDPQNAPDVNYVVENPSLDLEQYAASYSGLMRIERLQFIADHCPTLRVEALKMALSFVQRTFNVDMYEEIHRKLSEATRSSLRELQNAPDAIPESGVEPPALDTAWVEATRKKALLKLEKLDTDLKNYKGNSIKESIRRGHDDLGDHYLDCGDLSNALKCYSRARDYCTSAKHVINMCLNVIKVSVYLQNWSHVLSYVSKAESTPEIAEQRGERDSQTQAILTKLKCAAGLAELAARKYKQAAKCLLLASFDHCDFPELLSPSNVAIYGGLCALATFDRQELQRNVISSSSFKLFLELEPQVRDIIFKFYESKYASCLKMLDEMKDNLLLDMYLAPHVRTLYTQIRNRALIQYFSPYVSADMHRMAAAFNTTVAALEDELTQLILEGLISARVDSHSKILYARDVDQRSTTFEKSLLMGKEFQRRAKAMMLRAAVLRNQIHVKSPPREGSQGELTPANSQSRMSTNM

SEQ ID NO: 5177 - protein, 527 aa, Homo sapiens
MRDSSAPSSASSSVTDLYCTPHSSRSDLVLPGTAGDFSLSASLSACTLLYEGAVEPMQIDVDPQEDPQNAPDVNYVVENPSLDLEQYAASYSGLMRIERLQFIADHCPTLRVEALKMALSFVQRTFNVDMYEEIHRKLSEATRELQNAPDAIPESGVEPPALDTAWVEATRKKALLKLEKLDTDLKNYKGNSIKESIRRGHDDLGDHYLDCGDLSNALKCYSRARDYCTSAKHVINMCLNVIKVSVYLQNWSHVLSYVSKAESTPEIAEQRGERDSQTQAILTKLKCAAGLAELAARKYKQAAKCLLLASFDHCDFPELLSPSNVAIYGGLCALATFDRQELQRNVISSSSFKLFLELEPQVRDIIFKFYESKYASCLKMLDEMKDNLLLDMYLAPHVRTLYTQIRNRALIQYFSPYVSADMHRMAAAFNTTVAALEDELTQLILEGLISARVDSHSKILYARDVDQRSTTFEKSLLMGKEFQRRAKAMMLRAAVLRNQIHVKSPPREGSQGELTPANSQSRMSTNM

SEQ ID NO: 5178 - protein, 958 aa, Homo sapiens
MKEAKDARYTNGHLFTTISVSGMTMCYACNKSITAKEALICPTCNVTIHNRCKDTLANCTKVKQKQQKAALLKNNTALQSVSLRSKTTIRERPSSAIYPSDSFRQSLLGSRRGRSSLSLAKSVSTTNIAGHFNDESPLGLRRILSQSTDSLNMRNRTLSVESLIDEEVIYSELMSDFEMDEKDFAADSWSLAVDSSFLQQHKKEVMKQQDVIYELIQTELHHVRTLKIMTRLFRTGMLEELHLEPGVVQGLFPCVDELSDIHTRFLSQLLERRRQALCPGSTRNFVIHRLGDLLISQFSGPSAEQMCKTYSEFCSRHSKALKLYKELYARDKRFQQFIRKVTRPAVLKRHGVQECILLVTQRITKYPLLISRILQHSHGIEEERQDLTTALGLVKELLSNVDEGIYQLEKGARLQEIYNRMDPRAQTPVPGKGPFGREELLRRKLIHDGCLLWKTATGRFKDVLVLLMTDVLVFLQEKDQKYIFPTLDKPSVVSLQNLIVRDIANQEKGMFLISAAPPEMYEVHTASRDDRSTWIRVIQQSVRTCPSREDFPLIETEDEAYLRRIKMELQQKDRALVELLREKVGLFAEMTHFQAEEDGGSGMALPTLPRGLFRSESLESPRGERLLQDAIREVEGLKDLLVGPGVELLLTPREPALPLEPDSGGNTSPGVTANGEARTFNGSIELCRADSDSSQRDRNGNQLRSPQEEALQRLVNLYGLLHGLQAAVAQQDTLMEARFPEGPERREKLCRANSRDGEAGRAGAAPVAPEKQATELALLQRQHALLQEELRRCRRLGEERATEAGSLEARLRESEQARALLEREAEEARRQLAALGQTEPLPAEAPWARRPVDPRRRSLPAGDALYLSFNPPQPSRGTDRLDLPVTTRSVHRNFEDRERQELGSPEERLQDSSDPDTGSEEEGSSRLSPPHSPRDFTRMQDIPEETESRDGEAVASES

SEQ ID NO: 5179 - protein, 283 aa, Homo sapiens
MAAAPQAPGRGSLRKTRPLVVKTSLNNPYIIRWSALESEDMHFILQTLEDRLKAIGLQKIEDKKKKNKTPFLKKESREKCSIAVDISDNLKEKKTDAKQQVSGWTPAHVRKQLVIGVNEVTRALERRELLLVLVCKSVKPAMITSHLIQLSLSRSVPACQVPRLSERIAPVIGLKCVLALAFKKNTTDFVDEVRAIIPRVPSLSVPWLQDRIEDSGENLETEPLESQDRELLDTSFEDLSKPKRKLADGRQASVTLQPLKIKKLIPNPNKIRKPPKSKKATPK

SEQ ID NO: 5180 - protein, 283 aa, Homo sapiens
MAAAPQAPGRGSLRKTRPLVVKTSLNNPYIIRWSALESEDMHFILQTLEDRLKAIGLQKIEDKKKKNKTPFLKKESREKCSIAVDISENLKEKKTDAKQQVSGWTPAHVRKQLAIGVNEVTRALERRELLLVLVCKSVKPAMITSHLIQLSLSRSVPACQVPRLSERIAPVIGLKCVLALAFKKNTTDFVDEVRAIIPRVPSLSVPWLQDRIEDSGENLETEPLESQDRELLDTSFEDLSKPKRKLADGRQASVTLQPLKIKKLIPNPNKIRKPPKSKKATPK

SEQ ID NO: 5181 - protein, 720 aa, Homo sapiens
MNNHVSSKPSTMKLKHTINPILLYFIHFLISLYTILTYIPFYFFSESRQEKSNRIKAKPVNSKPDSAYRSVNSLDGLASVLYPGCDTLDKVFTYAKNKFKNKRLLGTREVLNEEDEVQPNGKIFKKVILGQYNWLSYEDVFVRAFNFGNGLQMLGQKPKTNIAIFCETRAEWMIAAQACFMYNFQLVTLYATLGGPAIVHALNETEVTNIITSKELLQTKLKDIVSLVPRLRHIITVDGKPPTWSEFPKGIIVHTMAAVEALGAKASMENQPHSKPLPSDIAVIMYTSGSTGLPKGVMISHSNIIAGITGMAERIPELGEEDVYIGYLPLAHVLELSAELVCLSHGCRIGYSSPQTLADQSSKIKKGSKGDTSMLKPTLMAAVPEIMDRIYKNVMNKVSEMSSFQRNLFILAYNYKMEQISKGRNTPLCDSFVFRKVRSLLGGNIRLLLCGGAPLSATTQRFMNICFCCPVGQGYGLTESAGAGTISEVWDYNTGRVGAPLVCCEIKLKNWEEGGYFNTDKPHPRGEILIGGQSVTMGYYKNEAKTKADFFEDENGQRWLCTGDIGEFEPDGCLKIIDRKKDLVKLQAGEYVSLGKVEAALKNLPLVDNICAYANSYHSYVIGFVVPNQKELTELARKKGLKGTWEELCNSCEMENEVLKVLSEAAISASLEKFEIPVKIRLSPEPWTPETGLVTDAFKLKRKELKTHYQADIERMYGRK

SEQ ID NO: 5182 - protein, 720 aa, Homo sapiens; identical to SEQ ID NO: 5181

SEQ ID NO: 5183 - protein, 292 aa, Homo sapiens
MLGAWAVEGTAVALLRLLLLLLPPAIRGPGLGVAGVAGAAGAGLPESVIWAVNAGGEAHVDVHGIHFRKDPLEGRVGRASDYGMKLPILRSNPEDQILYQTERYNEETFGYEVPIKEEGDYVLVLKFAEVYFAQSQQKVFDVRLNGHVVVKDLDIFDRVGHSTAHDEIIPMSIRKGKLSVQGEVSTFTGKLYIEFVKGYYDNPKVCALYIMAGTVDDVPKLQPHPGLEKKEEEEEEEEYDEGSNLKKQTNKNRVQSGPRTPNPYASDNSSLMFPILVAFGVFIPTLFCLCRL

SEQ ID NO: 5184 - protein, 488 aa, Homo sapiens
MAYSQGGGKKKVCYYYDGDIGNYYYGQGHPMKPHRIRMTHNLLLNYGLYRKMEIYRPHKATAEEMTKYHSDEYIKFLRSIRPDNMSEYSKQMHIFNVGEDCPAFDGLFEFCQLSTGGSVAGAVKLNRQQTDMAVNWAGGLHHAKKYEASGFCYVNDIVLAILELLKYHQRVLYIDIDIHHGDGVEEAFYTTDRVMTVSFHKYGEYFPGTGDLRDIGAGKGKYYAVNFPMCDGIDDESYGQIFKPIISKVMEMYQPSAVVLQCGADSLSGDRLGCFNLTVKGHAKCVEVVKTFNLPLLMLGGGGYTIRNVARCWTYETAVALDCEIPNELPYNDYFEYFGPDFKLHISPSNMTNQNTPEYMEKIKQRLFENLRMLPHAPGVQMQAIPEDAVHEDSGDEDGEDPDKRISIRASDKRIACDEEFSDSEDEGEGGRRNVADHKKGAKKARIEEDKKETEDKKTDVKEEDKSKDNSGEKTDTKGTKSEQLSNP

SEQ ID NO: 5185 - protein, 722 aa, Homo sapiens
MYRALYAFRSAEPNALAFAAGETFLVLERSSAHWWLAARARSGETGYVPPAYLRRLQGLEQDVLQAIDRAIEAVHNTAMRDGGKYSLEQRGVLQKLIHHRKETLSRRGPSASSVAVMTSSTSDHHLDAAAARQPNGVCRAGFERQHSLPSSEHLGADGGLYQIPLPSSQIPPQPRRAAPTTPPPPVKRRDREALMASGSGGHNTMPSGGNSVSSGSSVSSTSLDTLYTSSSPSEPGSSCSPTPPPVPRRGTHTTVSQVQPPPSKASAPEPPAEEEVATGTTSASDDLEALGTLSLGTTEEKAAAEAAVPRTIGAELMELVRRNTGLSHELCRVAIGIIVGHIQASVPASSPVMEQVLLSLVEGKDLSMALPSGQVCHDQQRLEVIFADLARRKDDAQQRSWALYEDEGVIRCYLEELLHILTDADPEVCKKMCKRNEFESVLALVAYYQMEHRASLRLLLLKCFGAMCSLDAAIISTLVSSVLPVELARDMQTDTQDHQKLCYSALILAMVFSMGEAVPYAHYEHLGTPFAQFLLNIVEDGLPLDTTEQLPDLCVNLLLALNLHLPAADQNVIMAALSKHANVKIFSEKLLLLLNRGDDPVRIFKHEPQPPHSVLKFLQDVFGSPATAAIFYHTDMMALIDITVRHIADLSPGDKLRMEYLSLMHAIVRTTPYLQHRHRLPDLQAILRRILNEEETSPQCQMDRMIVREMCKEFLVLGEAPS

SEQ ID NO: 5186 - protein, 715 aa, Homo sapiens
MYRALYAFRSAEPNALAFAAGETFLVLERSSAHWWLAARARSGETGYVPPAYLRRLQGLEQDVLQAIDRAIEAVHNTAMRDGGKYSLEQRGVLQKLIHHRKETLSRRGPSASSVAVMTSSTSDHHLDAAAARQPNGVCRAGFERQHSLPSSEHLGADGGLYQIPPQPRRAAPTTPPPPVKRRDREALMASGSGGHNTMPSGGNSVSSGSSVSSTSLDTLYTSSSPSEPGSSCSPTPPPVPRRGTHTTVSQVQPPPSKASAPEPPAEEEVATGTTSASDDLEALGTLSLGTTEEKAAAEAAVPRTIGAELMELVRRNTGLSHELCRVAIGIIVGHIQASVPASSPVMEQVLLSLVEGKDLSMALPSGQVCHDQQRLEVIFADLARRKDDAQQRSWALYEDEGVIRCYLEELLHILTDADPEVCKKMCKRNEFESVLALVAYYQMEHRASLRLLLLKCFGAMCSLDAAIISTLVSSVLPVELARDMQTDTQDHQKLCYSALILAMVFSMGEAVPYAHYEHLGTPFAQFLLNIVEDGLPLDTTEQLPDLCVNLLLALNLHLPAADQNVIMAALSKHANVKIFSEKLLLLLNRGDDPVRIFKHEPQPPHSVLKFLQDVFGSPATAAIFYHTDMMALIDITVRHIADLSPGDKLRMEYLSLMHAIVRTTPYLQHRHRLPDLQAILRRILNEEETSPQCQMDRMIVREMCKEFLVLGEAPS

SEQ ID NO: 5187 - protein, 548 aa, Homo sapiens
MALHVPKAPGFAQMLKEGAKHFSGLEEAVYRNIQACKELAQTTRTAYGPNGMNKMVINHLEKLFVTNDAATILRELEVQHPAAKMIVMASHMQEQEVGDGTNFVLVFAGALLELAEELLRIGLSVSEVIEGYEIACRKAHEILPNLVCCSAKNLRDIDEVSSLLRTSIMSKQYGNEVFLAKLIAQACVSIFPDSGHFNVDNIRVCKILGSGISSSSVLHGMVFKKETEGDVTSVKDAKIAVYSCPFDGMITETKGTVLIKTAEELMNFSKGEENLMDAQVKAIADTGANVVVTGGKVADMALHYANKYNIMLVRLNSKWDLRRLCKTVGATALPRLTPPVLEEMGHCDSVYLSEVGDTQVVVFKHEKEDGAISTIVLRGSTDNLMDDIERAVDDGVNTFKVLTRDKRLVPGGGATEIELAKQITSYGETCPGLEQYAIKKFAEAFEAIPRALAENSGVKANEVISKLYAVHQEGNKNVGLDIEAEVPAVKDMLEAGILDTYLGKYWAIKLATNAAVTVLRVDQIIMAKPAGGPKPPSGKKDWDDDQND

SEQ ID NO: 5188 - protein, 815 aa, Homo sapiens
MREPEELMPDSGAVFTFGKSKFAENNPGKFWFKNDVPVHLSCGDEHSAVVTGNNKLYMFGSNNWGQLGLGSKSAISKPTCVKALKPEKVKLAACGRNHTLVSTEGGNVYATGGNNEGQLGLGDTEERNTFHVISFFTSEHKIKQLSAGSNTSAALTEDGRLFMWGDNSEGQIGLKNVSNVCVPQQVTIGKPVSWISCGYYHSAFVTTDGELYVFGEPENGKLGLPNQLLGNHRTPQLVSEIPEKVIQVACGGEHTVVLTENAVYTFGLGQFGQLGLGTFLFETSEPKVIENIRDQTISYISCGENHTALITDIGLMYTFGDGRHGKLGLGLENFTNHFIPTLCSNFLRFIVKLVACGGCHMVVFAAPHRGVAKEIEFDEINDTCLSVATFLPYSSLTSGNVLQRTLSARMRRRERERSPDSFSMRRTLPPIEGTLGLSACFLPNSVFPRCSERNLQESVLSEQDLMQPEEPDYLLDEMTKEAEIDNSSTVESLGETTDILNMTHIMSLNSNEKSLKLSPVQKQKKQQTIGELTQDTALTENDDSDEYEEMSEMKEGKACKQHVSQGIFMTQPATTIEAFSDEEVEIPEEKEGAEDSKGNGIEEQEVEANEENVKVHGGRKEKTEILSDDLTDKAEDHEFSKTEELKLEDVDEEINAENVESKKKTVGDDESVPTGYHSKTEGAERTNDDSSAETIEKKEKANLEERAICEYNENPKGYMLDDADSSSLEILENSETTPSKDMKKTKKIFLFKRVPSINQKIVKNNNEPLPEIKSIGDQIILKSDNKDADQNHMSQNHQNIPPTNTERRSKSCTIL

SEQ ID NO: 5189 - protein, 646 aa, Homo sapiens
MREPEELMPDSGAVFTFGKSKFAENNPGKFWFKNDVPVHLSCGDEHSAVVTGNNKLYMFGSNNWGQLGLGSKSAISKPTCVKALKPEKVKLAACGRNHTLVSTEGGNVYATGGNNEGQLGLGDTEERNTFHVISFFTSEHKIKQLSAGSNTSAALTEDGRLFMWGDNSEGQIGLKNVSNVCVPQQVTIGKPVSWISCGYYHSAFVTTDGELYVFGEPENGKLGLPNQLLGNHRTPQLVSEIPEKVIQVACGGEHTVVLTENAVYTFGLGQFGQLGLGTFLFETSEPKVIENIRDQTISYISCGENHTALITDIGLMYTFGDGRHGKLGLGLENFTNHFIPTLCSNFLRFIVKLVACGGCHMVVFAAPHRGVAKEIEFDEINDTCLSVATFLPYSSLTSGNVLQRTLSARMRRRERERSPDSFSMRRTLPPIEGTLGLSACFLPNSVFPRCSERNLQESVLSEQDLMQPEEPDYLLDEMTKEAEIDNSSTVESLGETTDILNMTHIMSLNSNEKSLKLSPVQKQKKQQTIGELTQDTALTENDDSDEYEEMSEMKEGKACKQHVSQGIFMTQPATTIEAFSDEEVEIPEEKEGAEDSKGNGIEEQEVEANEENVKVHGGRKEKTEILSDDLTDKAEYSASHSQIVSV

SEQ ID NO: 5190 - protein, 1152 aa, Homo sapiens
MREPEELMPDSGAVFTFGKSKFAENNPGKFWFKNDVPVHLSCGDEHSAVVTGNNKLYMFGSNNWGQLGLGSKSAISKPTCVKALKPEKVKLAACGRNHTLVSTEGGNVYATGGNNEGQLGLGDTEERNTFHVISFFTSEHKIKQLSAGSNTSAALTEDGRLFMWGDNSEGQIGLKNVSNVCVPQQVTIGKPVSWISCGYYHSAFVTTDGELYVFGEPENGKLGLPNQLLGNHRTPQLVSEIPEKVIQVACGGEHTVVLTENAVYTFGLGQFGQLGLGTFLFETSEPKVIENIRDQTISYISCGENHTALITDIGLMYTFGDGRHGKLGLGLENFTNHFIPTLCSNFLRFIVKLVACGGCHMVVFAAPHRGVAKEIEFDEINDTCLSVATFLPYSSLTSGNVLQRTLSARMRRRERERSPDSFSMRRTLPPIEGTLGLSACFLPNSVFPRCSERNLQESVLSEQDLMQPEEPDYLLDEMTKEAEIDNSSTVESLGETTDILNMTHIMSLNSNEKSLKLSPVQKQKKQQTIGELTQDTALTENDDSDEYEEMSEMKEGKACKQHVSQGIFMTQPATTIEAFSDEEVEIPEEKEGAEDSKGNGIEEQEVEANEENVKVHGGRKEKTEILSDDLTDKAEVSEGKAKSVGEAEDGPEGRGDGTCEEGSSGAEHWQDEEREKGEKDKGRGEMERPGEGEKELAEKEEWKKRDGEEQEQKEREQGHQKERNQEMEEGGEEEHGEGEEEEGDREEEEEKEGEGKEEGEGEEVEGEREKEEGERKKEERAGKEEKGEEEGDQGEGEEEETEGRGEEKEEGGEVEGGEVEEGKGEREEEEEEGEGEEEEGEGEEEEGEGEEEEGEGKGEEEGEEGEGEEEGEEGEGEGEEEEGEGEGEEEGEGEGEEEEGEGEGEEEGEGEGEEEEGEGKGEEEGEEGEGEGEEEEGEGEGEDGEGEGEEEEGEWEGEEEEGEGEGEEEGEGEGEEGEGEGEEEEGEGEGEEEEGEEEGEEEGEGEEEGEGEGEEEEEGEVEGEVEGEEGEGEGEEEEGEEEGEEREKEGEGEENRRNREEEEEEEGKYQETGEEENERQDGEEYKKVSKIKGSVKYGKHKTYQKKSVTNTQGNGKEQRSKMPVQSKRLLKNGPSGSKKFWNNVLPHYLELK

SEQ ID NO: 5191 - protein, 94 aa, Homo sapiens
MELSDVTLIEGVGNEVMVVAGVVVLILALVLAWLSTYVADSGSNQLLGAIVSAGDTSVLHLGHVDHLVAGQGNPEPTELPHPSEANTSLDKKAR

SEQ ID NO: 5192 - protein, 301 aa, Homo sapiens
MELSDVTLIEGVGNEVMVVAGVVVLILALVLAWLSTYVADSGSNQLLGAIVSAGDTSVLHLGHVDHLVAGQGNPEPTELPHPSEGNDEKAEEAGEGRGDSTGEAGAGGGVEPSLEHLLDIQGLPKRQAGAGSSSPEAPLRSEDSTCLPPSPGLITVRLKFLNDTEELAVARPEDTVGALKSKYFPGQESQMKLIYQGRLLQDPARTLRSLNITDNCVIHCHRSPPGSAVPGPSASLAPSATEPPRLGVNVGSLMVPVFVVLLGVVWYFRINYRQFFTAPATVSLVGVTVFFSFLVFGMYGR

SEQ ID NO: 5193 - protein, 594 aa, Homo sapiens
MGKKSRVKTQKSGTGATATVSPKEILNLTSELLQKCSSPAPGPGKEWEEYVQIRTLVEKIRKKQKGLSVTFDGKREDYFPDLMKWASENGASVEGFEMVNFKEEGFGLRATRDIKAEELFLWVPRKLLMTVESAKNSVLGPLYSQDRILQAMGNIALAFHLLCERASPNSFWQPYIQTLPSEYDTPLYFEEDEVRYLQSTQAIHDVFSQYKNTARQYAYFYKVIQTHPHANKLPLKDSFTYEDYRWAVSSVMTRQNQIPTEDGSRVTLALIPLWDMCNHTNGLITTGYNLEDDRCECVALQDFRAGEQIYIFYGTRSNAEFVIHSGFFFDNNSHDRVKIKLGVSKSDRLYAMKAEVLARAGIPTSSVFALHFTEPPISAQLLAFLRVFCMTEEELKEHLLGDSAIDRIFTLGNSEFPVSWDNEVKLWTFLEDRASLLLKTYKTTIEEDKSVLKNHDLSVRAKMAIKLRLGEKEILEKAVKSAAVNREYYRQQMEEKAPLPKYEESNLGLLESSVGDSRLPLVLRNLEEEAGVQDALNIREAISKAKATENGLVNGENSIPNGTRSENESLNQESKRAVEDAKGSSSDSTAGVKE

SEQ ID NO: 5194 - protein, 296 aa, Homo sapiens
MGKKSRVKTQKSGTGATATVSPKEILNLTSELLQKCSSPAPGPGKEWEEYVQIRTLVEKIRKKQKGLSVTFDGKREDYFPDLMKWASENGASVEGFEMVNFKEEGFGLRATRDIKAEELFLWVPRKLLMTVESAKNSVLGPLYSQDRILQAMGNIALAFHLLCERASPNSFWQPYIQTLPSEYDTPLYFEEDEVRYLQSTQAIHDVFSQYKNTARQYAYFYKVIQTHPHANKLPLKDSFTYEDYRWAVSSVMTRQNQIPTEDGSRVTLALIPLWDMCNHTNGLTPEDSFALAVASA

SEQ ID NO: 5195 - protein, 830 aa, Homo sapiens
MAPKTKKGCKVTLPEKPVKLASHTRDTTGVSQMFPSSKARTKSLLGDDVFSTMAGLEEADAEVSGISEADPQALLQAMKDLDGMDADILGLKKSNSAPSKKAAKDPGKGELPNHPKPAGGAIPTKKSLPSPSSSGHQNRRFSSEDLEDPLRGLLSYDEGGITKQPPVTQSKTASDKSPSTVRDQGPSIPLTPGDTPIRKKEELLFDDGDDIMATLGFGDSPKAEKRQIGDQEGPRPARSTLDELLGRGMATKLLARPGTGEHREFKLDKKYQRPQDSEDMWGDEDFTFGAYQPTVVSSEGRQSRRQSVSRFFADSGADPKGEPGSKQSPPMASSPIQPRKGGADWLGLKDEDLDLFPASPTREAHRESSVPVTPSVPPPASQHSTPAGLPPSRAKPPTEGAGSPAKASQASKLRASKEEKEDWLSHALSRKKSQGLAREQHAGTSEGLHLAGTAGHPPSGSQPLTSTQGLEHAAAGGSSGTTARERPCVRPGVSGSPVTQNHAASALPTGSPKRGTAPGDLSATEPATCFPSTQKPTEPSVPVQPLLPESLARSLLPSTEYQKQLLAAQVQLQCSPAELQAELLHSQARLAELEAQVRKLELERAQHELLLGSLQQQHQADLELIESAHRSRIKVLETSYQQREERLRRENEELSARYLSQCQEAEQARAELTAQHQRRLAAIAQEKDQEMERLRELQRASILDMRRDHEEQLQRLKLLKDREVDAATSATSHTRSLNSIIHQMEKFSSSLHELSSRVEASHLTTSQERELGIRQRDEQLRALQERLGQQQRDMGRDEEGSLCAAHLPKAQLSGYAVEATRNQSQLQRFL

SEQ ID NO: 5196 - protein, 325 aa, Homo sapiens
MAPKTKKGCKGSIDDFLGDLLGDDMTLPEKPVKLASHTRDTTGVSQMFPSSKARTKSLLGDDVFSTMAGLEEADAEVSGISEADPQALLQAMKDLDGMDADILGLKKSNSAPSKKAAKDPGKGELPNHPKPAGGAIPTKKSLPSPSSSGHQNRRFSSEDLEDPLRGLLSYDEGGITKQPPVTQSKTASDKSPSTVRDQGPSIPLTPGDTPIRKKEELLFDDGDDIMATLGFGDSPKAEKRQIGDQEGPRPARSTLDELLGRGMATKLLARPGTGEHREFKLDKKYQRPQGKEACGGRNRTGGRPLDQAFITTYNEKSASHPDTHM

SEQ ID NO: 5197 - protein, 662 aa, Homo sapiens
MAPKTKKGCKVTLPEKPVKLASHTRDTTGVSQMFPSSKARTKSLLGDDVFSTMAGLEEADAEVSGISEADPQALLQAMKDLDGMDADILGLKKSNSAPSKKAAKDPGKGELPNHPKPAGGAIPTKKSLPSPSSSGHQNRRFSSEDLEDPLRGLLSYDEGGITKQPPVTQSKTASDKSPSTVRDQGPSIPLTPGDTPIRKKEELLFDDGDDIMATLGFGDSPKAEKRQIGDQEGPRPARSTLDELLGRGMATKLLARPGTGEHREFKLDKKYQRPQDSEDMWGDEDFTFGAYQPTVVSSEGRQSRRQSVSRFFADSGADPKGEPGSKQSPPMASSPIQPRKGGADWLGLKDEDLDLFPASPTREAHRESSVPVTPSVPPPASQHSTPAGLPPSRAKPPTEGAGSPAKASQASKLRASKEEKEDWLSHALSRKKSQGLAREQHAGTSEGLHLAGTAGHPPSGSQPLTSTQGLEHAAAGGSSGTTARERPCVRPGVSGSPVTQNHAASALPTGSPKRGTAPGDLSATEPATCFPSTQKPTEPSVPVQPLLPESLARSLLPSTEYQKQLLAAQVQLQCSPAELQAELLHSQARLAELEAQVRGSGAVGAGGRVATGGDTESGWKLPQEGGRAVGTGQRGVQPPPLPGCWPSCCLPGAEAGARTGPA

SEQ ID NO: 5198 - protein, 834 aa, Homo sapiens
MAPKTKKGCKVTLPEKPVKLASHTRDTTGVSQMFPSSKARTKSLLGDDVFSTMAGLEEADAEVSGISEADPQALLQAMKDLDGMDADILGLKKSNSAPSKKAAKDPGKGELPNHPKPAGGAIPTKKSLPSPSSSGHQNRRFSSEDLEDPLRGLLSYDEGGITKQPPVTQSKTASDKSPSTVRDQGPSIPLTPGDTPIRKKEELLFDDGDDIMATLGFGDSPKAEKRQIGDQEGPRPARSTLDELLGRGMATKLLARPGTGEHREFKLDKKYQRPQDSEDMWGDEDFTFGAYQPTVVSSEGRQSRRQSVSRFFADSGADPKGEPGSKQSPPMASSPIQPRKGGADWLGLKDEDLDLFPASPTREAHRESSVPVTPSVPPPASQHSTPAGLPPSRAKPPTEGAGSPAKASQASKLRASKEEKEDWLSHALSRKKSQGLAREQHAGTSEGLHLAGTAGHPPSGSQPLTSTQGLEHAAAGGSSGTTARERPCVRPGVSGSPVTQNHAASALPTGSPKRGTAPGDLSATEPATCFPSTQKPTEPSVPVQPLLPESLARSLLPSTEYQKQLLAAQVQLQCSPAELQAELLHSQARLAELEAQVRKLELERAQHELLLGSLQQQHQADLELIESAHRSRIKVLETSYQQREERLRRENEELSARYLSQCQEAEQARAELTAQHQRRLAAIAQEKDQEMERLRELQRASILDMRRDHEEQLQRLKLLKDREVDAATSATSHTRSLNSIIHQMEKFSSSLHELSSRVEASHLTTSQERELGIRQRDEQLRALQERLGQQQRDMEEERSRDEEGSLCAAHLPKAQLSGYAVEATRNQSQLQRFL

SEQ ID NO: 5199 - protein, 848 aa, Homo sapiens
MAPKTKKGCKGSIDDFLGDLLGDDMTLPEKPVKLASHTRDTTGVSQMFPSSKARTKSLLGDDVFSTMAGLEEADAEVSGISEADPQALLQAMKDLDGMDADILGLKKSNSAPSKKAAKDPGKGELPNHPKPAGGAIPTKKSLPSPSSSGHQNRRFSSEDLEDPLRGLLSYDEGGITKQPPVTQSKTASDKSPSTVRDQGPSIPLTPGDTPIRKKEELLFDDGDDIMATLGFGDSPKAEKRQIGDQEGPRPARSTLDELLGRGMATKLLARPGTGEHREFKLDKKYQRPQDSEDMWGDEDFTFGAYQPTVVSSEGRQSRRQSVSRFFADSGADPKGEPGSKQSPPMASSPIQPRKGGADWLGLKDEDLDLFPASPTREAHRESSVPVTPSVPPPASQHSTPAGLPPSRAKPPTEGAGSPAKASQASKLRASKEEKEDWLSHALSRKKSQGLAREQHAGTSEGLHLAGTAGHPPSGSQPLTSTQGLEHAAAGGSSGTTARERPCVRPGVSGSPVTQNHAASALPTGSPKRGTAPGDLSATEPATCFPSTQKPTEPSVPVQPLLPESLARSLLPSTEYQKQLLAAQVQLQCSPAELQAELLHSQARLAELEAQVRKLELERAQHELLLGSLQQQHQADLELIESAHRSRIKVLETSYQQREERLRRENEELSARYLSQCQEAEQARAELTAQHQRRLAAIAQEKDQEMERLRELQRASILDMRRDHEEQLQRLKLLKDREVDAATSATSHTRSLNSIIHQMEKFSSSLHELSSRVEASHLTTSQERELGIRQRDEQLRALQERLGQQQRDMEEERSRDEEGSLCAAHLPKAQLSGYAVEATRNQSQLQRFL

SEQ ID NO: 5200 - protein, 830 aa, Homo sapiens; identical to SEQ ID NO: 5195

SEQ ID NO: 5201 - protein, 325 aa, Homo sapiens; identical to SEQ ID NO: 5196

SEQ ID NO: 5202 - protein, 662 aa, Homo sapiens; identical to SEQ ID NO: 5197

SEQ ID NO: 5203 - protein, 834 aa, Homo sapiens; identical to SEQ ID NO: 5198

SEQ ID NO: 5204 - protein, 848 aa, Homo sapiens; identical to SEQ ID NO: 5199

SEQ ID NO: 5205 - protein, 195 aa, Homo sapiens
MELSESVQKGFQMLADPRSFDSNAFTLLLRAAFQSLLDAQADEAVLDHPDLKHIDPVVLKHCHAAAATYILEAGKHRADKSTLSTYLEDCKFDRERIELFCTEYQNNKNSLEILLGSIGRSLPHITDVSWRLEYQIKTNQLHRMYRPAYLVTLSVQNTDSPSYPEISFSCSMEQLQDLVGKLKDASKSLERATQL

SEQ ID NO: 5206 - protein, 1000 aa, Homo sapiens
MAERKPNGGSGGASTSSSGTNLLFSSSATEFSFNVPFIPVTQASASPASLLLPGEDSTDVGEEDSFLGQTSIHTSAPQTFSYFSQVSSSSDPFGNIGQSPLTTAATSVGQSGFPKPLTALPFTTGSQDVSNAFSPSISKAQPGAPPSSLMGINSYLPSQPSSLPPSYFGNQPQGIPQPGYNPYRHTPGSSRANPYIAPPQLQQCQTPGPPAHPPPSGPPVQMYQMPPGSLPPVPSSVQSPAQQQVPARPGAPSVQVPSPFLLQNQYEPVQPHWFYCKEVEYKQLWMPFSVFDSLNLEEIYNSVQPDPESVVLGTDGGRYDVYLYDRIRKAAYWEEEPAEVRRCTWFYKGDTDSRFIPYTEEFSEKLEAEYKKAVTTNQWHRRLEFPSGETIVMHNPKVIVQFQPSSVPDEWGTTQDGQTRPRVVKRGIDDNLDEIPDGEMPQVDHLVFVVHGIGPVCDLRFRSIIECVDDFRVVSLKLLRTHFKKSLDDGKVSRVEFLPVHWHSSLGGDATGVDRNIKKITLPSIGRFRHFTNETLLDILFYNSPTYCQTIVEKVGMEINHLHALFMSRNPDFKGGVSVAGHSLGSLILFDILSNQKDLNLSKCPGPLAVANGVVKQLHFQEKQMPEEPKLTLDESYDLVVENKEVLTLQETLEALSLSEYFSTFEKEKIDMESLLMCTVDDLKEMGIPLGPRKKIANFVEHKAAKLKKAASEKKAVAATSTKGQEQSAQKTKDMASLPSESNEPKRKLPVGACVSSVCVNYESFEVGAGQVSVAYNSLDFEPEIFFALGSPIAMFLTIRGVDRIDENYSLPTCKGFFNIYHPLDPVAYRLEPMIVPDLDLKAVLIPHHKGRKRLHLELKESLSRMGSDLKQGFISSLKSAWQTLNEFARAHTSSTQLQEELEKVANQIKEEEEKQVVEAEKVVESPDFSKDEDYLGKVGMLNGGRRIDYVLQEKPIESFNEYLFALQSHLCYWESEDTALLLLKEIYRTMNISPEQPQH

SEQ ID NO: 5207 - protein, 1081 aa, Homo sapiens
MESAGLEQLLRELLLPDTERIRRATEQLQIVLRAPAALPALCDLLASAADPQIRQFAAVLTRRRLNTRWRRLAAEQRESLKSLILTALQRETEHCVSLSLAQLSATIFRKEGLEAWPQLLQLLQHSTHSPHSPEREMGLLLLSVVVTSRPEAFQPHHRELLRLLNETLGEVGSPGLLFYSLRTLTTMAPYLSTEDVPLARMLVPKLIMAMQTLIPIDEAKACEALEALDELLESEVPVITPYLSEVLTFCLEVARNVALGNAIRIRILCCLTFLVKVKSKALLKNRLLPPLLHTLFPIVAAEPPPGQLDPEDQDSEEEELEIELMGETPKHFAVQVVDMLALHLPPEKLCPQLMPMLEEALRSESPYQRKAGLLVLAVLSDGAGDHIRQRLLPPLLQIVCKGLEDPSQVVRNAALFALGQFSENLQPHISSYSREVMPLLLAYLKSVPLGHTHHLAKACYALENFVENLGPKVQPYLPELMECMLQLLRNPSSPRAKELAVSALGAIATAAQASLLPYFPAIMEHLREFLLTGREDLQPVQIQSLETLGVLARAVGEPMRPLAEECCQLGLGLCDQVDDPDLRRCTYSLFAALSGLMGEGLAPHLEQITTLMLLSLRSTEGIVPQYDGSSSFLLFDDESDGEEEEELMDEDVEEEDDSEISGYSVENAFFDEKEDTCAAVGEISVNTSVAFLPYMESVFEEVFKLLECPHLNVRKAAHEALGQFCCALHKACQSCPSEPNTAALQAALARVVPSYMQAVNRERERQVVMAVLEALTGVLRSCGTLTLKPPGRLAELCGVLKAVLQRKTACQDTDEEEEEEDDDQAEYDAMLLEHAGEAIPALAAAAGGDSFAPFFAGFLPLLVCKTKQGCTVAEKSFAVGTLAETIQGLGAASAQFVSRLLPVLLSTAQEADPEVRSNAIFGMGVLAEHGGHPAQEHFPKLLGLLFPLLARERHDRVRDNICGALARLLMASPTRKPEPQVLAALLHALPLKEDLEEWVTIGRLFSFLYQSSPDQVIDVAPELLRICSLILADNKIPPDTKAALLLLLTFLAKQHTDSFQAALGSLPVDKAQELQAVLGLS

SEQ ID NO: 5208 - protein, 539 aa, Homo sapiens
MAVCARLCGVGPSRGCRRRQQRRGPAETAAADSEPDTDPEEERIEASAGVGGGLCAGPSPPPPRCSLLELPPELLVEIFASLPGTDLPSLAQVCTKFRRILHTDTIWRRRCREEYGVCENLRKLEITGVSCRDVYAKLLHRYRHILGLWQPDIGPYGGLLNVVVDGLFIIGWMYLPPHDPHVDDPMRFKPLFRIHLMERKAATVECMYGHKGPHHGHIQIVKKDEFSTKCNQTDHHRMSGGRQEEFRTWLREEWGRTLEDIFHEHMQELILMKFIYTSQYDNCLTYRRIYLPPSRPDDLIKPGLFKGTYGSHGLEIVMLSFHGRRARGTKITGDPNIPAGQQTVEIDLRHRIQLPDLENQRNFNELSRIVLEVRERVRQEQQEGGHEAGEGRGRQGPRESQPSPAQPRAEAPSKGPDGTPGEDGGEPGDAVAAAEQPAQCGQGQPFVLPVGVSSRNEDYPRTCRMCFYGTGLIAGHGFTSPERTPGVFILFDEDRFGFVWLELKSFSLYSRVQATFRNADAPSPQAFDEMLKNIQSLTS

SEQ ID NO: 5209 - protein, 220 aa, Homo sapiens
MNGFTPDEMSRGGDAAAAVAAVVAAAAAAASAGNGTGAGTGAEVPGAGAVSAAGPPGAAGPGPGQLCCLREDGERCGRAAGNASFSKRIQKSISQKKVKIELDKSARHLYICDYHKNLIQSVRNRRKRKGSDDDGGDSPVQDIDTPEVDLYQLQVNTLRRYKRHFKLPTRPGLNKAQLVEIVGCHFRSIPVNEKDTLTYFIYSVKNDKNKSDLKVDSGVH

SEQ ID NO: 5210 - protein, 226 aa, Homo sapiens
MEGCVSNLMVCNLAYSGKLEELKESILADKSLATRTDQDSRTALHWACSAGHTEIVEFLLQLGVPVNDKDDAGWSPLHIAASAGRDEIVKALLGKGAQVNAVNQNGCTPLHYAASKNRHEIAVMLLEGGANPDAKDHYEATAMHRAAAKGNLKMIHILLYYKASTNIQDTEGNTPLHLACDEERVEEAKLLVSQGASIYIENKEEKTPLQVAKGGLGLILKRMVEG

SEQ ID NO: 5211 - protein, 151 aa, Homo sapiens
MEGCVSNLMVCNLAYSGKLEELKESILADKSLATRTDQDSRTALHWACSAGHTEIVEFLLQLGVPVNDKDDAGWSPLHIAASAGRDEIVKALLGKGAQVNAVNQNGCTPLHYAASKNRHEIAVMLLEGGANPDAKDHYEATAMHRAAAKDT

SEQ ID NO: 5212 - protein, 256 aa, Homo sapiens
MKLTRKMVLTRAKASELHSVRKLNCWGSRLTDISICQEMPSLEVITLSVNSISTLEPVSRCQRLSELYLRRNRIPSLAELFYLKGLPRLRVLWLAENPCCGTSPHRYRMTVLRTLPRLQKLDNQAVTEEELSRALSEGEEITAAPEREGTGHGGPKLCCTLSSLSSAAETGRDPLDSEEEATSGAQDERGLKPPSRGQFPSLSARDASSSHRGRNVLTAILLLLRELDAEGLEAVQQTVGSRLQALRGEEVQEHAE

SEQ ID NO: 5213 - protein, 827 aa, Homo sapiens
  VARIANT 519: Xaa = Any Amino Acid
MASADKNGGSVSSVSSSRLQSRKPPNLSITIPPPEKETQAPGEQDSMLPERKNPAYLKSVSLQEPRSRWQESSEKRPGFRRQASLSQSIRKGAAQWFGVSGDWEGQRQQWQRRSLHHCSMRYGRLKASCQRDLELPSQEAPSFQGTESPKPCKMPKIVDPLARGRAFRHPEEMDRPHALHPPLTPGVLSLTSFTSVRSGYSHLPRRKRMSVAHMSLQAAAALLKGRSVLDATGQRCRVVKRSFAFPSFLEEDVVDGADTFDSSFFSKEEMSSMPDDVFESPPLSASYFRGIPHSASPVSPDGVQIPLKEYGRAPVPGPRRGKRIASKVKHFAFDRKKRHYGLGVVGNWLNRSYRRSISSTVQRQLESFDSHRPYFTYWLTFVHVIITLLVICTYGIAPVGFAQHVTTQLVLRNKGVYESVKYIQQENFWVGPSSIDLIHLGAKFSPCIRKDGQIEQLVLRERDLERDSGCCVQNDHSGCIQTQRKDCSETLATFVKWQDDTGPPMDKSDLGQKRTSGAXCHQDPRTCEEPASSGAHIWPDDITKWPICTEQARSNHTGFLHMDCEIKGRPCCIGTKGSCEITTREYCEFMHGYFHEEATLCSQVHCLDKVCGLLPFLNPEVPDQFYRLWLSLFLHAGVVHCLVSVVFQMTILRDLEKLAGWHRIAIIFILSGITGNLASAIFLPYRAEVGPAGSQFGLLACLFVELFQSWPLLERPWKAFLNLSAIVLFLFICGLLPWIDNIAHIFGFLSGLLLAFAFLPYITFGTSDKYRKRALILVSLLAFAGLFAALVLWLYIYPINWPWIEHLTCFPFTSRFCEKYELDQVLH

SEQ ID NO: 5214 - protein, 856 aa, Homo sapiens
MASADKNGGSVSSVSSSRLQSRKPPNLSITIPPPEKETQAPGEQDSMLPEGFQNRRLKKSQPRTWASHTTACPPSFLPKRKNPAYLKSVSLQEPRSRWQESSEKRPGFRRQASLSQSIRKGAAQWFGVSGDWEGQRQQWQRRSLHHCSMRYGRLKASCQRDLELPSQEAPSFQGTESPKPCKMPKIVDPLARGRAFRHPEEMDRPHALHPPLTPGVLSLTSFTSVRSGYSHLPRRKRMSVAHMSLQAAAALLKGRSVLDATGQRCRVVKRSFAFPSFLEEDVVDGADTFDSSFFSKEEMSSMPDDVFESPPLSASYFRGIPHSASPVSPDGVQIPLKEYGRAPVPGPRRGKRIASKVKHFAFDRKKRHYGLGVVGNWLNRSYRRSISSTVQRQLESFDSHRPYFTYWLTFVHVIITLLVICTYGIAPVGFAQHVTTQLVLRNKGVYESVKYIQQENFWVGPSSIDLIHLGAKFSPCIRKDGQIEQLVLRERDLERDSGCCVQNDHSGCIQTQRKDCSETLATFVKWQDDTGPPMDKSDLGQKRTSGAVCHQDPRTCEEPASSGAHIWPDDITKWPICTEQARSNHTGFLHMDCEIKGRPCCIGTKGSCEITTREYCEFMHGYFHEEATLCSQVHCLDKVCGLLPFLNPEVPDQFYRLWLSLFLHAGVVHCLVSVVFQMTILRDLEKLAGWHRIAIIFILSGITGNLASAIFLPYRAEVGPAGSQFGLLACLFVELFQSWPLLERPWKAFLNLSAIVLFLFICGLLPWIDNIAHIFGFLSGLLLAFAFLPYITFGTSDKYRKRALILVSLLAFAGLFAALVLWLYIYPINWPWIEHLTCFPFTSRFCEKYELDQVLH

SEQ ID NO: 5215 - protein, 578 aa, Homo sapiens
MNISVDLETNYAELVLDVGRVTLGENSRKKMKDCKLRKKQNERVSRAMCALLNSGGGVIKAEIENEDYSYTKDGIGLDLENSFSNILLFVPEYLDFMQNGNYFLIFVKSWSLNTSGLRITTLSSNLYKRDITSAKVMNATAALEFLKDMKKTRGRLYLRPELLAKRPRVDIQEENNMKALAGVFFDRTELDRKEKLTFTESTHVEIKNFSTEKLLQRIKEILPQYVSAFANTDGGYLFIGLNEDKEIIGFKAEMSDLDDLEREIEKSIRKMPVHHFCMEKKKINYSCKFLGVYDKGSLCGYVCALRVERFCCAVFAKEPDSWHVKDNRVMQLTRKEWIQFMVEAEPKFSSSYEEVISQINTSLPAPHSWPLLEWQRQRHHCPGLSGRITYTPENLCRKLFLQHEGLKQLICEEMDSVRKGSLIFSRSWSVDLGLQENHKVLCDALLISQDSPPVLYTFHMVQDEEFKGYSTQTALTLKQKLAKIGGYTKKVCVMTKIFYLSPEGMTSCQYDLRSQVIYPESYYFTRRKYLLKALFKALKRLKSLRDQFSFAENLYQIIGIDCFQKNDKKMFKSCRRLT

SEQ ID NO: 5216 - protein, 953 aa, Homo sapiens
MTAAENVCYTLINVPMDSEPPSEISLKNDLEKGDVKSKTEALKKVIIMILNGEKLPGLLMTIIRFVLPLQDHTIKKLLLVFWEIVPKTTPDGRLLHEMILVCDAYRKDLQHPNEFIRGSTLRFLCKLKEAELLEPLMPAIRACLEHRHSYVRRNAVLAIYTIYRNFEHLIPDAPELIHDFLVNEKDASCKRNAFMMLIHADQDRALDYLSTCIDQVQTFGDILQLVIVELIYKVCHANPSERARFIRCIYNLLQSSSPAVKYEAAGTLVTLSSAPTAIKAAAQCYIDLIIKESDNNVKLIVLDRLIELKEHPAHERVLQDLVMDILRVLSTPDLEVRKKTLQLALDLVSSRNVEELVIVLKKEVIKTNNVSEHEDTDKYRQLLVRTLHSCSVRFPDMAANVIPVLMEFLSDNNEAAAADVLEFVREAIQRFDNLRMLIVEKMLEVFHAIKSVKIYRGALWILGEYCSTKEDIQSVMTEIRRSLGEIPIVESEIKKEAGELKPEEEITVGPVQKLVTEMGTYATQSALSSSRPTKKEEDRPPLRGFLLDGDFFVAASLATTLTKIALRYVALVQEKKKQNSFVAEAMLLMATILHLGKSSLPKKPITDDDVDRISLCLKVLSECSPLMNDIFNKECRQSLSHMLSAKLEEEKLSQKKESEKRNVTVQPDDPISFMQLTAKNEMNCKEDQFQLSLLAAMGNTQRKEAADPLASKLNKVTQLTGFSDPVYAEAYVHVNQYDIVLDVLVVNQTSDTLQNCTLELATLGDLKLVEKPSPLTLAPHDFANIKANVKVASTENGIIFGNIVYDVSGAASDRNCVVLSDIHIDIMDYIQPATCTDAEFRQMWAEFEWENKVTVNTNMVDLNDYLQHILKSTNMKCLTPEKALSGYCGFMAANLYARSIFGEDALANVSIEKPIHQGPDAAVTGHIRIRAKSQGMALSLGDKINLSQKKTSI

SEQ ID NO: 5217 - protein, 304 aa, Homo sapiens
MAVTKELLQMDLYALLGIEEKAADKEVKKAYRQKALSCHPDKNPDNPRAAELFHQLSQALEVLTDAAARAAYDKVRKAKKQAAERTQKLDEKRKKVKLDLEARERQAQAQESEEEEESRSTRTLEQEIERLREEGSRQLEEQQRLIREQIRQERDQRLRGKAENTEGQGTPKLKLKWKCKKEDESKGGYSKDVLLRLLQKYGEVLNLVLSSKKPGTAVVEFATVKAAELAVQNEVGLVDNPLKISWLEGQPQDAVGRSHSGLSKGSVLSERDYESLVMMRMRQAAERQQLIARMQQEDQEGPPT

SEQ ID NO: 5218 - protein, 677 aa, Homo sapiens
MAEEKKLKLSNTVLPSESMKVVAESMGIAQIQEETCQLLTDEVSYRIKEIAQDALKFMHMGKRQKLTTSDIDYALKLKNVEPLYGFHAQEFIPFRFASGGGRELYFYEEKEVDLSDIINTPLPRVPLDVCLKAHWLSIEGCQPAIPENPPPAPKEQQKAEATEPLKSAKPGQEEDGPLKGKGQGATTADGKGKEKKAPPLLEGAPLRLKPRSIHELSVEQQLYYKEITEACVGSCEAKRAEALQSIATDPGLYQMLPRFSTFISEGVRVNVVQNNLALLIYLMRMVKALMDNPTLYLEKYVHELIPAVMTCIVSRQLCLRPDVDNHWALRDFAARLVAQICKHFSTTTNNIQSRITKTFTKSWVDEKTPWTTRYGSIAGLAELGHDVIKTLILPRLQQEGERIRSVLDGPVLSNIDRIGADHVQSLLLKHCAPVLAKLRPPPDNQDAYRAEFGSLGPLLCSQVVKARAQAALQAQQVNRTTLTITQPRPTLTLSQAPQPGPRTPGLLKVPGSIALPVQTLVSARAAAPPQPSPPPTKFIVMSSSSSAPSTQQVLSLSTSAPGSGSTTTSPVTTTVPSVQPIVKLVSTATTAPPSTAPSGPGSVQKYIVVSLPPTGEGKGGPTSHPSPVPPPASSPSPLSGSALCGGKQEAGDSPPPAPGTPKANGSQPNSGSPQPAP

SEQ ID NO: 5219 - protein, 667 aa, Homo sapiens
MAEEKKLKLSNTVLPSESMKVVAESMGIAQIQEETCQLLTDEVSYRIKEIAQDALKFMHMGKRQKLTTSDIDYALKLKNVEPLYGFHAQEFIPFRFASGGGRELYFYEEKEVDLSDIINTPLPRVPLDVCLKAHWLSIEGCQPAIPENPPPAPKEQQKAEATEPLKSAKPGQEEDGPLKGKGQGATTADGKGKEKKAPPLLEGAPLRLKPRSIHELSVEQQLYYKEITEACVGSCEAKRAEALQSIATDPGLYQMLPRFSTFISEGVRVNVVQNNLALLIYLMRMVKALMDNPTLYLEKYVHELIPAVMTCIVSRQLCLRPDVDNHWALRDFAARLVAQICKHFSTTTNNIQSRITKTFTKSWVDEKTPWTTRYGSIAGLAELGHDVIKTLILPRLQQEGERIRSVLDGPVLSNIDRIGADHVQSLLLKHCAPVLAKLRPPPDNQDAYRAEFGSLGPLLCSQVVKARAQAALQAQQPRPTLTLSQAPQPGPRTPGLLKVPGSIALPVQTLVSARAAAPPQPSPPPTKFIVMSSSSSAPSTQQVLSLSTSAPGSGSTTTSPVTTTVPSVQPIVKLVSTATTAPPSTAPSGPGSVQKYIVVSLPPTGEGKGGPTSHPSPVPPPASSPSPLSGSALCGGKQEAGDSPPPAPGTPKANGSQPNSGSPQPAP

SEQ ID NO: 5220 - protein, 667 aa, Homo sapiens
MAEEKKLKLSNTVLPSESMKVVAESMGIAQIQEETCQLLTDEDALKFMHMGKRQKLTTSDIDYALKLKNVEPLYGFHAQEFIPFRFASGGGRELYFYEEKEVDLSDIINTPLPRVPLDVCLKAHWLSIEGCQPAIPENPPPAPKEQQKAEATEPLKSAKPGQEEDGPLKGKGQGATTADGKGKEKKAPPLLEGAPLRLKPRSIHELSVEQQLYYKEITEACVGSCEAKRAEALQSIATDPGLYQMLPRFSTFISEGVRVNVVQNNLALLIYLMRMVKALMDNPTLYLEKYVHELIPAVMTCIVSRQLCLRPDVDNHWALRDFAARLVAQICKHFSTTTNNIQSRITKTFTKSWVDEKTPWTTRYGSIAGLAELGHDVIKTLILPRLQQEGERIRSVLDGPVLSNIDRIGADHVQSLLLKHCAPVLAKLRPPPDNQDAYRAEFGSLGPLLCSQVVKARAQAALQAQQVNRTTLTITQPRPTLTLSQAPQPGPRTPGLLKVPGSIALPVQTLVSARAAAPPQPSPPPTKFIVMSSSSSAPSTQQVLSLSTSAPGSGSTTTSPVTTTVPSVQPIVKLVSTATTAPPSTAPSGPGSVQKYIVVSLPPTGEGKGGPTSHPSPVPPPASSPSPLSGSALCGGKQEAGDSPPPAPGTPKANGSQPNSGSPQPAP

SEQ ID NO: 5221 - protein, 677 aa, Homo sapiens; identical to SEQ ID NO: 5218

SEQ ID NO: 5222 - protein, 440 aa, Homo sapiens
MVTMCGGHRPENFLHQVLTEFGEELAGEGKSEVGGGAPRSYLQVASAECWAAAPAVHVGEPVHAGGLHTERGADPVIGLYLVHRGGACQTPTVGNRQTPTLGIHARPRRRATTSLLTLLLAFGKNAVRCALIGPGSLTSRTRPLTEPLGEKERREVFFPPRPERVEHNVESSRWEPRRRGACGSRGGNFPSPRGGSGVASLERAESSSTEPAKAIKPIDRKSVHQICSGPVVPSLSTAVKELVENSLDAGATNIDLKLKDYGVDLIEVSGNGCGVEEENFEGLTLKHHTSKIQEFADLPQVETFGFRGEALSSLCALSDVTISTCHVSAKVGTRLVFDHYGKIIQKTPYPHPRGMTVSVKQLFSTLPVHHKEFQRNIKKKRACFPFAFCRDCQFPEASPAMLPVQPAELTPRSTPPHPCSLEDNVITVFSSVKNGPGSSR

SEQ ID NO: 5223 - protein, 134 aa, Homo sapiens
MWGRRRKLRRLNDVTISTCHVSAKVGTRLVFDHYGKIIQKTPYPHPRGMTVSVKQLFSTLPVHHKEFQRNIKKKRACFPFAFCRDCQFPEASPAMLPVQPAELTPRSTPPHPCSLEDNVITVFSSVKNGPGSSR

SEQ ID NO: 5224 - protein, 86 aa, Homo sapiens
MTVSVKQLFSTLPVHHKEFQRNIKKKRACFPFAFCRDCQFPEASPAMLPVQPAELTPRSTPPHPCSLEDNVITVFSSVKNGPGSSR

SEQ ID NO: 5225 - protein, 139 aa, Homo sapiens
MWGRRRKLRRLNDVTISTCHVSAKVGTRLVFDHYGKIIQKTPYPHPRGMTVSVKQLFSTLPVHHKEFQRNIKKKRACFPFAFCRDCQFPEASPAMLPVQPAELTPRSTPPHPCSLEDNVITVFSSVKNGPGSLLPDVCH

SEQ ID NO: 5226 - protein, 86 aa, Homo sapiens; identical to SEQ ID NO: 5224

SEQ ID NO: 5227 - protein, 116 aa, Homo sapiens
MAEARGEAASWRPRSGILSAPAIRCPLDFFSTEPAKAIKPIDRKSVHQICSGPVVPSLSTAVKELVENSLDAGATNIDLKLKDYGVDLIEVSGNGCGVEEENFEGLISFSSETSHI

SEQ ID NO: 5228 - protein, 134 aa, Homo sapiens; identical to SEQ ID NO: 5223

SEQ ID NO: 5229 - protein, 198 aa, Homo sapiens
MNHRAWPPFSLLDLKLKDYGVDLIEVSGNGCGVEEENFEGLTLKHHTSKIQEFADLPQVETFGFRGEALSSLCALSDVTISTCHVSAKVGTRLVFDHYGKIIQKTPYPHPRGMTVSVKQLFSTLPVHHKEFQRNIKKKRACFPFAFCRDCQFPEASPAMLPVQPAELTPRSTPPHPCSLEDNVITVFSSVKNGPGSSR

SEQ ID NO: 5230 - protein, 350 aa, Homo sapiens
MKCSLRVWFLSVAFLLVFIMSLLFTYSHHSMATLPYLDSGALDGTHRVKLVPGYAGLQRLSKERLSGKSCACRRCMGDAGASDWFDSHFDGNISPVWTRENMDLPPDVQRWWMMLQPQFKSHNTNEVLEKLFQIVPGENPYRFRDPHQCRRCAVVGNSGNLRGSGYGQDVDGHNFIMRMNQAPTVGFEQDVGSRTTHHFMYPESAKNLPANVSFVLVPFKVLDLLWIASALSTGQIRFTYAPVKSFLRVDKEKVQIYNPAFFKYIHDRWTEHHGRYPSTGMLVLFFALHVCDEVNVYGFGADSRGNWHHYWENNRYAGEFRKTGVHDADFEAHIIDMLAKASKIEVYRGN

SEQ ID NO: 5231 - protein, 201 aa, Homo sapiens
MKVHMLVGVLVMVGFTVGKVPVPDIRTCHFCLVEDPSVGCISGSEKCTISSSSLCMVITIYYDVKVRFIVRGCGQYISYRCQEKRNTYFAEYWYQAQCCQYDYCNSWSSPQLQSSLPEPHDRPLALPLSDSQIQWFYQALNLSLPLPNFHAGTEPDGLDPMVTLSLNLGLSFAELRRMYLFLNSSGLLVLPQAGLLTPHPS

SEQ ID NO: 5232 - protein, 199 aa, Homo sapiens
MDFKIEHTWDGFPVKHEPVFIRLNPGDRGVMMDISAPFFRDPPAPLGEPGKPFNELWDYEVVEAFFLNDITEQYLEVELCPHGQHLVLLLSGRRNVWKQELPLSFRVSRGETKWEGKAYLPWSYFPPNVTKFNSFAIHGSKDKRSYEALYPVPQHELQQGQKPDFHCLEYFKSFNFNTLLGEEWKQPESDLWLIEKCDI

SEQ ID NO: 5233 - protein, 264 aa, Homo sapiens
MHNPDGSASPTADPGSELQTLGQAARRPPPPRAGHDAPRRTRPSARKPLSCFSRRPMPTREPPKTRGSRGHLHTHPPGPGPPLQGLAPRGLKTSAPRPPCQPQPGPHKAKTKKIVFEDELLSQALLGAKKPIGAIPKGHKPRPHPVPDYELKYPPVSSERERSRYVAVFQDQYGEFLELQHEVGCAQAKLRQLEALLSSLPPPQSQKEAQVAARVWREFEMKRMDPGFLDKQARCHYLKGKLRHLKTQIQKFDDQGDSEGSVYF

SEQ ID NO: 5234 - protein, 160 aa, Homo sapiens
MYTITKGPSKLVAQRRTGPTQQQVEGRLGELLKCRQPAPPTSQPPRAQPFAQPPGPWPLSSPGPRLVFNRVNGRRAPSTSPSFEGTQETYTVAHEENVRFVSEAWQQVQQQLDGGPAGEGGPRPVQYVERTPNPRLQNFVPIDLDEWWAQQFLARITSCS

SEQ ID NO: 5235 - protein, 1342 aa, Homo sapiens
MEENEVESSSDAAPGPGRPEEPSESGLGVGTSEAVSADSSDAAAAPGQAEADDSGVGQSSDRGSRSQEEVSESSSSADPLPNSYLPDSSSVSHGPVAGVTGGPPALVHSSALPDPNMLVSDCTASSSDLGSAIDKIIESTIGPDLIQNCITVTSAEDGGAETTRYLILQGPDDGAPMTSPMSSSTLAHSLAAIEALADGPTSTSTCLEAQGGPSSPVQLPPASGAEEPDLQSLEAMMEVVVVQQFKCKMCQYRSSTKATLLRHMRERHFRPVAAAAAAAGKKGRLRKWSTSTKSQEEEGPEEEDDDDIVDAGAIDDLEEDSDYNPAEDEPRGRQLRLQRPTPSTPRPRRRPGRPRKLPRLEISDLPDGVEGEPLVSSQSGQSPPEPQDPEAPSSSGPGHLVAMGKVSRTPVEAGVSQSDAENAAPSCPDEHDTLPRRRGRPSRRFLGKKYRKYYYKSPKPLLRPFLCRICGSRFLSHEDLRFHVNSHEAGDPQLFKCLQCSYRSRRWSSLKEHMFNHVGSKPYKCDECSYTSVYRKDVIRHAAVHSRDRKKRPDPTPKLSSFPCPVCGRVYPMQKRLTQHMKTHSTEKPHMCDKCGKSFKKRYTFKMHLLTHIQAVANRRFKCEFCEFVCEDKKALLNHQLSHVSDKPFKCSFCPYRTFREDFLLSHVAVKHTGAKPFACEYCHFSTRHKKNLRLHVRCRHASSFEEWGRRHPEEPPSRRRPFFSLQQIEELKQQHSAAPGPPPSSPGPPEIPPEATTFQSSEAPSLLCSDTLGGATIIYQQGAEESTAMATQTALDLLLNMSAQRELGGTALQVAVVKSEDVEAGLASPGGQPSPEGATPQVVTLHVAEPGGGAAAESQLGPPDLPQITLAPGPFGGTGYSVITAPPMEEGTSAPGTPYSEEPAGEAAQAVVVSDTLKEAGTHYIMATDGTQLHHIELTADGSISFPSPDALASGAKWPLLQCGGLPRDGPEPPSPAKTHCVGDSQSSASSPPATSKALGLAVPPSPPSAATAASKKFSCKICAEAFPGRAEMESHKRAHAGPGAFKCPDCPFSARQWPEVRAHMAQHSSLRPHQCSQCSFASKNKKDLRRHMLTHTKEKPFACHLCGQRFNRNGHLKFHIQRLHSPDGRKSGTPTARAPTQTPTQTIILNSDDETLATLHTALQSSHGVLGPERLQQALSQEHIIVAQEQTVTNQEEAAYIQEITTADGQTVQHLVTSDNQVQYIISQDGVQHLLPQEYVVVPEGHHIQVQEGQITHIQYEQGAPFLQESQIQYVPVSPGQQLVTQAQLEAAAHSAVTAVADAAMAQAQGLFGTDETVPEHIQQLQHQGIEYDVITLADD

SEQ ID NO: 5236 - protein, 724 aa, Homo sapiens
MPEEVHHGEEEVETFAFQAEIAQLMSLIINTFYSNKEIFLRELISNASDALDKIRYESLTDPSKLDSGKELKIDIIPNPQERTLTLVDTGIGMTKADLINNLGTIAKSGTKAFMEALQAGADISMIGQFGVGFYSAYLVAEKVVVITKHNDDEQYAWESSAGGSFTVRADHGEPIGRGTKVILHLKEDQTEYLEERRVKEVVKKHSQFIGYPITLYLEKEREKEISDDEAEEEKGEKEEEDKDDEEKPKIEDVGSDEEDDSGKDKKKKTKKIKEKYIDQEELNKTKPIWTRNPDDITQEEYGEFYKSLTNDWEDHLAVKHFSVEGQLEFRALLFIPRRAPFDLFENKKKKNNIKLYVRRVFIMDSCDELIPEYLNFIRGVVDSEDLPLNISREMLQQSKILKVIRKNIVKKCLELFSELAEDKENYKKFYEAFSKNLKLGIHEDSTNRRRLSELLRYHTSQSGDEMTSLSEYVSRMKETQKSIYYITGESKEQVANSAFVERVRKRGFEVVYMTEPIDEYCVQQLKEFDGKSLVSVTKEGLELPEDEEEKKKMEESKAKFENLCKLMKEILDKKVEKVTISNRLVSSPCCIVTSTYGWTANMERIMKAQALRDNSTMGYMMAKKHLEINPDHPIVETLRQKAEADKNDKAVKDLVVLLFETALLSSGFSLEDPQTHSNRIYRMIKLGLGIDEDEVAAEEPNAAVPDEIPPLEGDEDASRMEEVD

SEQ ID NO: 5237 - protein, 686 aa, Homo sapiens
MSLRDKGGEEECFEYDCQDEERKPTHRQHDTQDLLEEVLCAERVGQMTKTYNDIDAVTRLLEEKERDLELAARIGQSLLKKNKTLTERNELLEEQVEHIREEVSQLRHELSMKDELLQFYTSAAEESEPESVCSTPLKRNESSSSVQNYFHLDSLQKKLKDLEEENVVLRSEASQLKTETITYEEKEQQLVNDCVKELRDANVQIASISEELAKKTEDAARQQEEITHLLSQIVDLQKKAKACAVENEELVQHLGAAKDAQRQLTAELRELEDKYAECMEMLHEAQEELKNLRNKTMPNTTSRRYHSLGLFPMDSLAAEIEGTMRKELQLEEAESPDITHQKRVFETVRNINQVVKQRSLTPSPMNIPGSNQSSAMNSLLSSCVSTPRSSFYGSDIGNVVLDNKTNSIILETEAADLGNDERSKKPGTPGTPGSHDLETALRRLSLRRENYLSERRFFEEEQERKLQELAEKGELRSGSLTPTESIMSLGTHSRFSEFTGFSGMSFSSRSYLPEKLQIVKPLEGSATLHHWQQLAQPHLGGILDPRPGVVTKGFRTLDVDLDEVYCLNDFEEDDTGDHISLPRLATSTPVQHPETSGERSQARVTVSGSRSYPSRPQASPEEMQEPPAATEEEEEEEEEEGSGEGTTISPVNLAPFPEAEFWAILTSVPGTIRSGSLSVASARLCG

SEQ ID NO: 5238 - protein, 175 aa, Homo sapiens [sequence omitted]

SEQ ID NO: 5239 - protein, 539 aa, Homo sapiens
MAELTVEVRGSNGAFYKGFIKDVHEDSLTVVFENNWQPERQVPFNEVRLPPPPDIKKEISEGDEVEVYSRANDQEPCGWWLAKVRMMKGEFYVIEYAACDATYNEIVTFERLRPVNQNKTVKKNTFFKCTVDVPEDLREACANENAHKDFKKAVGACRIFYHPETTQLMILSASEATVKRVNILSDMHLRSIRTKLMLMSRNEEATKHLECTKQLAAAFHEEFVVREDLMGLAIGTHGSNIQQARKVPGVTAIELDEDTGTFRIYGESADAVKKARGFLEFVEDFIQVPRNLVGKVIGKNGKVIQEIVDKSGVVRVRIEGDNENKLPREDGMVPFVFVGTKESIGNVQVLLEYHIAYLKEVEQLRMERLQIDEQLRQIGSRSYSGRGRGRRGPNYTSGYGTNSELSNPSETESERKDELSDWSLAGEDDRDSRHQRDSRRRPGGRGRSVSGGRGRGGPRGGKSSISSVLKDPDSNPYSLLDNTESDQTADTDASESHHSTNRRRRSRRRRTDEDAVLMDGMTESDTASVNENGLGKRCD

SEQ ID NO: 5240 - protein, 536 aa, Homo sapiens
MMKGEFYVIEYAACDATYNEIVTFERLRPVNQNKTVKKNTFFKCTVDVPEDLREACANENAHKDFKKAVGACRIFYHPETTQLMILSASEATVKRVNILSDMHLRSIRTKLMLMSRNEEATKHLECTKQLAAAFHEEFVVREDLMGLAIGTHGSNIQQARKVPGVTAIELDEDTGTFRIYGESADAVKKARGFLEFVEDFIQVPRNLVGKVIGKNGKVIQEIVDKSGVVRVRIEGDNENKLPREDGMVPFVFVGTKESIGNVQVLLEYHIAYLKEVEQLRMERLQIDEQLRQIGSRSYSGRGRGRRGPNYTSGYGTNSELSNPSETESERKDELSDWSLAGEDDRDSRHQRDSRRRPGGRGRSVSGGRGRGGPRGGKSSISSVLKDPDSNPYSLLDNTESDQTADTDASESHHSTNRRRRSRRRRTDEDAVLMDGMTESDTASVNENGLVTVADYISRAESQSRQRNLPRETLAKNKKEMAKDVIEEHGPSEKAINGPTSASGDDISKLQRTPGEEKINTLKEENTQEAAVLNGVS

SEQ ID NO: 5241 - protein, 621 aa, Homo sapiens
MAELTVEVRGSNGAFYKGFIKDVHEDSLTVVFENNWQPERQVPFNEVRLPPPPDIKKEISEGDEVEVYSRANDQEPCGWWLAKVRMMKGEFYVIEYAACDATYNEIVTFERLRPVNQNKTVKKNTFFKCTVDVPEDLREACANENAHKDFKKAVGACRIFYHPETTQLMILSASEATVKRVNILSDMHLRSIRTKLMLMSRNEEATKHLECTKQLAAAFHEEFVVREDLMGLAIGTHGSNIQQARKVPGVTAIELDEDTGTFRIYGESADAVKKARGFLEFVEDFIQVPRNLVGKVIGKNGKVIQEIVDKSGVVRVRIEGDNENKLPREDGMVPFVFVGTKESIGNVQVLLEYHIAYLKEVEQLRMERLQIDEQLRQIGSRSYSGRGRGRRGPNYTSGYGTNSELSNPSETESERKDELSDWSLAGEDDRDSRHQRDSRRRPGGRGRSVSGGRGRGGPRGGKSSISSVLKDPDSNPYSLLDNTESDQTADTDASESHHSTNRRRRSRRRRTDEDAVLMDGMTESDTASVNENGLVTVADYISRAESQSRQRNLPRETLAKNKKEMAKDVIEEHGPSEKAINGPTSASGDDISKLQRTPGEEKINTLKEENTQEAAVLNGVS

SEQ ID NO: 5242 - protein, 178 aa, Homo sapiens
MTTLRAFTCDDLFRFNNINLDPLTETYGIPFYLQYLAHWPEYFIVAEAPGGELMGYIMGKAEGSVAREEWHGHVTALSVAPEFRRLGLAAKLMELLEEISERKGGFFVDLFVRVSNQVAVNMYKQLGYSVYRTVIEYYSASNGEPDEDAYDMRKALSRDTEKKSIIPLPHPVRPEDIE

SEQ ID NO: 5243 - protein, 166 aa, Homo sapiens
MLSQSCNLDPLTETYGIPFYLQYLAHWPEYFIVAEAPGGELMGYIMGKAEGSVAREEWHGHVTALSVAPEFRRLGLAAKLMELLEEISERKGGFFVDLFVRVSNQVAVNMYKQLGYSVYRTVIEYYSASNGEPDEDAYDMRKALSRDTEKKSIIPLPHPVRPEDIE

SEQ ID NO: 5244 - protein, 111 aa, Homo sapiens
MTTLRAFTCDDLFRFNNINLDPLTETYGIPFYLQYLAHWPEYFIVAEAPGGELMGYIMGKAEGSVAREEWHGHVTALSVAPEFRRLGLAAKLMELLEEISERYEESTFQGY

SEQ ID NO: 5245 - protein, 726 aa, Homo sapiens
MEGERKNNNKRWYFTREQLENSPSRRFGVDPDKELSYRQQAANLLQDMGQRLNVSQLTINTAIVYMHRFYMIQSFTQFPGNSVAPAALFLAAKVEEQPKKLEHVIKVAHTCLHPQESLPDTRSEAYLQQVQDLVILESIILQTLGFELTIDHPHTHVVKCTQLVRASKDLAQTSYFMATNSLHLTTFSLQYTPPVVACVCIHLACKWSNWEIPVSTDGKHWWEYVDATVTLELLDELTHEFLQILEKTPNRLKRIWNWRACEAAKKTKADDRGTDEKTSEQTILNMISQSSSDTTIAGLMSMSTSTTSAVPSLPVSEESSSNLTSVEMLPGKRWLSSQPSFKLEPTQGHRTSENLALTGVDHSLPQDGSNAFISQKQNSKSVPSAKVSLKEYRAKHAEELAAQKRQLENMEANVKSQYAYAAQNLLSHHDSHSSVILKMPIEGSENPERPFLEKADKTALKMRIPVAGGDKAASSKPEEIKMRIKVHAAADKHNSVEDSVTKSREHKEKHKTHPSNHHHHHNHHSHKHSHSQLPVGTGNKRPGDPKHSSQTSNLAHKTYSLSSSFSSSSSTRKRGPSEETGGAVFDHPAKIAKSTKSSSLNFSFPSLPTMGQMPGHSSDTSGLSFSQPSCKTRVPHSKLDKGPTGANGHNTTQTIDYQDTVNMLHSLLSAQGVQPTQPTAFEFVRPYSDYLNPRSGGISSRSGNTDKPRPPPLPSEPPPPLPPLPK

SEQ ID NO: 5246 - protein, 214 aa, Homo sapiens
MDDSETGFNLKVVLVSFKQCLDEKEEVLLDPYIASWKGLVRFLNSLGTIFSFISKDVVSKLRIMERLRGGPQSEHYRSLQAMVAHELSNRLVDLERRSHHPESGCRTVLRLHRALHWLQLFLEGLRTSPEDARTSALCADSYNASLAAYHPWVVRRAVTVAFCTLPTREVFLEAMNVGPPEQAVQMLGEALPFIQRVYNVSQKLYAEHSLLDLP

SEQ ID NO: 5247 - protein, 589 aa, Homo sapiens
MAESGESGGPPGSQDSAAGAEGAGAPAAAASAEPKIMKVTVKTPKEKEEFAVPENSSVQQFKEEISKRFKSHTDQLVLIFAGKILKDQDTLSQHGIHDGLTVHLVIKTQNRPQDHSAQQTNTAGSNVTTSSTPNSNSTSGSATSNPFGLGGLGGLAGLSSLGLNTTNFSELQSQMQRQLLSNPEMMVQIMENPFVQSMLSNPDLMRQLIMANPQMQQLIQRNPEISHMLNNPDIMRQTLELARNPAMMQEMMRNQDRALSNLESIPGGYNALRRMYTDIQEPMLSAAQEQFGGNPFASLVSNTSSGEGSQPSRTENRDPLPNPWAPQTSQSSSASSGTASTVGGTTGSTASGTSGQSTTAPNLVPGVGASMFNTPGMQSLLQQITENPQLMQNMLSAPYMRSMMQSLSQNPDLAAQMMLNNPLFAGNPQLQEQMRQQLPTFLQQMQNPDTLSAMSNPRAMQALLQIQQGLQTLATEAPGLIPGFTPGLGALGSTGGSSGTNGSNATPSENTSPTAGTTEPGHQQFIQQMLQALAGVNPQLQNPEVRFQQQLEQLSAMGFLNREANLQALIATGGDINAAIERLLGSQPS

SEQ ID NO: 5248 - protein, 561 aa, Homo sapiens
MAESGESGGPPGSQDSAAGAEGAGAPAAAASAEPKIMKVTVKTPKEKEEFAVPENSSVQQFKEEISKRFKSHTDQLVLIFAGKILKDQDTLSQHGIHDGLTVHLVIKTQNRPQDHSAQQTNTAGSNVTTSSTPNSNSTSGSATSNPFGLGGLGGLAGLSSLGLNTTNFSELQSQMQRQLLSNPEMMVQIMENPFVQSMLSNPDLMRQLIMANPQMQQLIQRNPEISHMLNNPDIMRQTLELARNPAMMQEMMRNQDRALSNLESIPGGYNALRRMYTDIQEPMLSAAQEQFGGNPFASLVSNTSSGEGSQPSRTENRDPLPNPWAPQTSQSSSASSGTASTVGGTTGSTASGTSGQSTTAPNLVPGVGASMFNTPGMQSLLQQITENPQLMQNMLSAPYMRSMMQSLSQNPDLAAQMQNPDTLSAMSNPRAMQALLQIQQGLQTLATEAPGLIPGFTPGLGALGSTGGSSGTNGSNATPSENTSPTAGTTEPGHQQFIQQMLQALAGVNPQLQNPEVRFQQQLEQLSAMGFLNREANLQALIATGGDINAAIERLLGSQPS

SEQ ID NO: 5249 - protein, 557 aa, Homo sapiens
MDSDEGYNYEFDEDEECSEEDSGAEEEEDEDDDEPDDDTLDLGEVELVEPGLGVGGERDGLLCGETGGGGGSALGPGGGGGGGGGGGGGGPGHEQEEDYRYEVLTAEQILQHMVECIREVNEVIQNPATITRILLSHFNWDKEKLMERYFDGNLEKLFAECHVINPSKKSRTRQMNTRSSAQDMPCQICYLNYPNSYFTGLECGHKFCMQCWSEYLTTKIMEEGMGHTISCPAHGCDILVDDNTVMRLITDSKVKLKYQHLITNSFVECNRLLKWCPAPDCHHVVKVQYPDAKPVRCKCGRQFCFNCGENWHDPVKCKWLKKWIKKCDDDSETSNWIAANTKECPKCHVTIEKDGGCNHMVCRNQNCKAEFCWVCLGPWEPHGSAWYNCNRYNEDDAKAARDAQERSRAALQRYLFYCNRYMNHMQSLRFEHKLYAQVKQKMEEMQQHNMSWIEVQFLKKAVDVLCQCRATLMYTYVFAFYLKKNNQSIIFENNQADLENATEVLSGYLERDISQDSLQDIKQKVQDKYRYCESRRRVLLQHVHEGYEKDLWEYIED

SEQ ID NO: 5250 - protein, 306 aa, Homo sapiens
MAAPIPQGFSCLSRVLGWWSRQPVLVTQSAAIVPVRTKKRFTPPIYQPKFKTEKEFMQHARKAGLVIPPEKSDRSIHLACTAGIFDAYVPPEGDARISSLSKEGLIERTERMKKTMASQVSIRRIKDYDANFKIKDFPEKAKDIFIEAHLCLNNSDHDRLHTLVTEHCFPDMTWDIKYKTVRWSFVESLEPSHVVQVRCSSMMNQGNVYGQITVRMHTRQTLAIYDRFGRLMYGQEDVPKDVLEYVVFEKQLTNPYGSWRMHTKIVPPWAPPKQPILKTVMIPGPQLKPEEEYEEAQGEAQKPQLA

SEQ ID NO: 5251 - protein, 349 aa, Homo sapiens
MAKAGDKSGSSGKKSLKRKAAAEELQEAAGAGDGATENGVQPPKAAAFPPGFSISEIKNKQRRHLMFTRWKQQQRKEKLAAKKKLKKEREALGDKAPPKPVPKTIDNQRVYDETTVDPNDEEVAYDEATDEFASYFNKQTSPKILITTSDRPHGRTVRLCEQLSTVIPNSHVYYRRGLALKKIIPQCIARDFTDLIVINEDRKTPNGLILSHLPNGPTAHFKMSSVRLRKEIKRRGKDPTEHIPEIILNNFTTRLGHSIGRMFASLFPHNPQFIGRQVATFHNQRDYIFFRFHRYIFRSEKKVGIQELGPRFTLKLRSLQKGTFDSKYGEYEWVHKPREMDTSRRKFHL

SEQ ID NO: 5252 - protein, 227 aa, Homo sapiens
MSVVPPNRSQTGWPRGVTQFGNKYIQQTKPLTLERTINLYPLTNYTFGTKEPLYEKDSSVAARFQRMREEFDKIGMRRTVEGVLIVHEHRLPHVLLLQLGTTFFKLPGGELNPGEDEVEGLKRLMTEILGRQDGVLQDWVIDDCIGNWWRPNFEPPQYPYIPAHITKPKEHKKLFLVQLQEKALFAVPKNYKLVAAPLFELYDNAPGYGPIISSLPQLLSRFNFIYN

SEQ ID NO: 5253 - protein, 731 aa, Homo sapiens
MSWFVDLAGKAEDLLNRVDQGAATALSRKDNASNIYSKNTDYTELHQQNTDLIYQTGPKSTYISSAADNIRNQKATILAGTANVKVGSRTPVEASHPVENASVPRPSSHFVRRKKSEPDDELLFDFLNSSQKEPTGRVEIRKEKGKTPVFQSSQTSSVSSVNPSVTTIKTIEENSFGSQTHEAASNSDSSHEGQEESSKENVSSNAACPDHTPTPNDDGKSHELSNLRLENQLLRNEVQSLNQEMASLLQRSKETQEELNKARARVEKWNADHSKSDRMTRGLRAQVDDLTEAVAAKDSQLAVLKVRLQEADQLLSTRTEALEALQSEKSRIMQDQSEGNSLQNQALQTFQERLHEADATLKREQESYKQMQSEFAARLNKVEMERQNLAEAITLAERKYSDEKKRVDELQQQVKLYKLNLESSKQELIDYKQKATRILQSKEKLINSLKEGSGFEGLDSSTASSMELEELRHEKEMQREEIQKLMGQIHQLRSELQDMEAQQVNEAESAREQLQDLHDQIAGQKASKQELETELERLKQEFHYIEEDLYRTKNTLQSRIKDRDEEIQKLRNQLTNKTLSNSSQSELENRLHQLTETLIQKQTMLESLSTEKNSLVFQLERLEQQMNSASGSSSNGSSINMSGIDNGEGTRLRNVPVLFNDTETNLAGMYGKVRKAASSIDQFSIRLGIFLRRYPIARVFVIIYMALLHLWVMIVLLTYTPEMHHDQPYGK

SEQ ID NO: 5254 - protein, 201 aa, Homo sapiens
MARSVRVLVDMDGVLADFEAGLLRGFRRRFPEEPHVPLEQRRGFLAREQYRALRPDLADKVASVYEAPGFFLDLEPIPGALDAVREMNDLPDTQVFICTSPLLKYHHCVGEKYRWVEQHLGPQFVERIILTRDKTVVLGDLLIDDKDTVRGQEETPSWEHILFTCCHNRHLVLPPTRRRLLSWSDNWREILDSKRGAAQRE

SEQ ID NO: 5255 - protein, 259 aa, Homo sapiens
MKDVDNLKSIKEEWVCETGSDNQPLGNNQQSNCEYFVDSLFEEAQKVSSKCVSPAEQKKQVDVNIKLWKNGFTVNDDFRSYSDGASQQFLNSIKKGELPSELQGIFDKEEVDVKVEDKKNEICLSTKPVFQPFSGQGHRLGSATPKIVSKAKNIEVENKNNLSAVPLNNLEPITNIQIWLANGKRIVQKFNITHRVSHIKDFIEKYQGSQRSPPFSLATALPVLRLLDETLTLEEADLQNAVIIQRLQKTASFRELSEH

SEQ ID NO: 5256 - protein, 420 aa, Homo sapiens
MFSPGQEEHCAPNKEPVKYGELVVLGYNGALPNGDRGRRKSRFALYKRPKANGVKPSTVHVISTPQASKAISCKGQHSISYTLSRNQTVVVEYTHDKDTDMFQVGRSTESPIDFVVTDTISGSQNTDEAQITQSTISRFACRIVCDRNEPYTARIFAAGFDSSKNIFLGEKAAKWKNPDGHMDGLTTNGVLVMHPRGGFTEESQPGVWREISVCGDVYTLRETRSAQQRGKLVESETNVLQDGSLIDLCGATLLWRTADGLFHTPTQKHIEALRQEINAARPQCPVGLNTLAFPSINRKEVVEEKQPWAYLSCGHVHGYHNWGHRSDTEANERECPMCRTVGPYVPLWLGCEAGFYVDAGPPTHAFTPCGHVCSEKSAKYWSQIPLPHGTHAFHAACPFCATQLVGEQNCIKLIFQGPID

SEQ ID NO: 5257 - protein, 550 aa, Homo sapiens
MATAEKQKHDGRVKIGHYILGDTLGVGTFGKVKVGKHELTGHKVAVKILNRQKIRSLDVVGKIRREIQNLKLFRHPHIIKLYQVISTPSDIFMVMEYVSGGELFDYICKNGRLDEKESRRLFQQILSGVDYCHRHMVVHRDLKPENVLLDAHMNAKIADFGLSNMMSDGEFLRTSCGSPNYAAPEVISGRLYAGPEVDIWSSGVILYALLCGTLPFDDDHVPTLFKKICDGIFYTPQYLNPSVISLLKHMLQVDPMKRATIKDIREHEWFKQDLPKYLFPEDPSYSSTMIDDEALKEVCEKFECSEEEVLSCLYNRNHQDPLAVAYHLIIDNRRIMNEAKDFYLATSPPDSFLDDHHLTRPHPERVPFLVAETPRARHTLDELNPQKSKHQGVRKAKWHLGIRSQSRPNDIMAEVCRAIKQLDYEWKVVNPYYLRVRRKNPVTSTYSKMSLQLYQVDSRTYLLDFRSIDDEITEAKSGTATPQRSGSVSNYRSCQRSDSDAEAQGKSSEVSLTSSVTSLDSSPVDLTPRPGSHTIEFFEMCANLIKILAQ

SEQ ID NO: 5258 - protein, 565 aa, Homo sapiens
MATAEKQKHDGRVKIGHYILGDTLGVGTFGKVKVGKHELTGHKVAVKILNRQKIRSLDVVGKIRREIQNLKLFRHPHIIKLYQVISTPSDIFMVMEYVSGGELFDYICKNGRKSDVPGVVKTGSTKELDEKESRRLFQQILSGVDYCHRHMVVHRDLKPENVLLDAHMNAKIADFGLSNMMSDGEFLRTSCGSPNYAAPEVISGRLYAGPEVDIWSSGVILYALLCGTLPFDDDHVPTLFKKICDGIFYTPQYLNPSVISLLKHMLQVDPMKRATIKDIREHEWFKQDLPKYLFPEDPSYSSTMIDDEALKEVCEKFECSEEEVLSCLYNRNHQDPLAVAYHLIIDNRRIMNEAKDFYLATSPPDSFLDDHHLTRPHPERVPFLVAETPRARHTLDELNPQKSKHQGVRKAKWHLGIRSQSRPNDIMAEVCRAIKQLDYEWKVVNPYYLRVRRKNPVTSTYSKMSLQLYQVDSRTYLLDFRSIDDEITEAKSGTATPQRSGSVSNYRSCQRSDSDAEAQGKSSEVSLTSSVTSLDSSPVDLTPRPGSHTIEFFEMCANLIKILAQ

SEQ ID NO: 5259 - protein, 1942 aa, Homo sapiens
MEDRRAEKSCEQACESLKRQDYEMALKHCTEALLSLGQYSMADFTGPCPLEIERIKIESLLYRIASFLQLKNYVQADEDCRHVLGEGLAKGEDAFRAVLCCMQLKGKLQPVSTILAKSLTGESLNGMVTKDLTRLKTLLSETETATSNALSGYHVEDLDEGSCNGWHFRPPPRGITSSEEYTLCKRFLEQGICRYGAQCTSAHSQEELAEWQKRYASRLIKLKQQNENKQLSGSYMETLIEKWMNSLSPEKVLSECIEGVKVEHNPDLSVTVSTKKSHQTWTFALTCKPARMLYRVALLYDAHRPHFSIIAISAGDSTTQVSQEVPENCQEWIGGKMAQNGLDHYVYKVGIAFNTEIFGTFRQTIVFDFGLEPVLMQRVMIDAASTEDLEYLMHAKQQLVTTAKRWDSSSKTIIDFEPNETTDLEKSLLIRYQIPLSADQLFTQSVLDKSLTKSNYQSRLHDLLYIEEIAQYKEISKFNLKVQLQILASFMLTGVSGGAKYAQNGQLFGRFKLTETLSEDTLAGRLVMTKVNAVYLLPVPKQKLVQTQGTKEKVYEATIEEKTKEYIFLRLSRECCEELNLRPDCDTQVELQFQLNRLPLCEMHYALDRIKDNGVLFPDISMTPTIPWSPNRQWDEQLDPRLNAKQKEAVLAITTPLAIQLPPVLIIGPYGTGKTFTLAQAVKHILQQQETRILICTHSNSAADLYIKDYLHPYVEAGNPQARPLRVYFRNRWVKTVHPVVHQYCLISSAHSTFQMPQKEDILKHRVVVVTLNTSQYLCQLDLEPGFFTHILLDEAAQAMECETIMPLALATQNTRIVLAGDHMQLSPFVYSEFARERNLHVSLLDRLYEHYPAEFPCRILLCENYRSHEAIINYTSELFYEGKLMASGKQPAHKDFYPLTFFTARGEDVQEKNSTAFYNNAEVFEVVERVEELRRKWPVAWGKLDDGSIGVVTPYADQVFRIRAELRKKRLSDVNVERVLNVQGKQFRVLFLSTVRTRHTCKHKQTPIKKKEQLLEDSTEDLDYGFLSNYKLLNTAITRAQSLVAVVGDPIALCSIGRCRKFWERFIALCHENSSLHGITFEQIKAQLEALELKKTYVLNPLAPEFIPRALRLQHSGSTNKQQQSPPKGKSLHHTQNDHFQNDGIVQPNPSVLIGNPIRAYTPPPPLGPHPNLGKSPSPVQRIDPHTGTSILYVPAVYGGNVVMSVPLPVPWTGYQGRFAVDPRIITHQAAMAYNMNLLQTHGRGSPIPYGLGHHPPVTIGQPQNQHQEKDQHEQNRNGKSDTNNSGPEINKIRTPEKKPTEPKQVDLESNPQNRSPESRPSVVYPSTKFPRKDNLNPRHINLPLPAPHAQYAIPNRHFHPLPQLPRPPFPIPQQHTLLNQQQNNLPEQPNQIPPQPNQVVQQQSQLNQQPQQPPPQLSPAYQAGPNNAFFNSAVAHRPQSPPAEAVIPEQQPPPMLQEGHSPLRAIAQPGPILPSHLNSFIDENPSGLPIGEALDRIHGSVALETLRQQQARFQQWSEHHAFLSQGSVPYPHHHHPHLQHLPQPPLGLHQPPVRADWKLTSSAEDEVETTYSRFQDLIRELSHRDQSETRELAEMPPPQSRLLQYRQVQSRSPPAVPSPPSSTDHSSHFSNFNDNSRDIEVASNPAFPQRLPPQIFNSPFSLPSEHLAPPPLKYLAPDGAWTFANLQQNHLMGPGFPYGLPPLPHRPPQNPFVQIQNHQHAIGQEPFHPLSSRTVSSSSLPSLEEYEPRGPGRPLYQRRISSSSVQPCSEEVSTPQDSLAQCKELQDHSNQSSFNFSSPESWVNTTSSTPYQNIPCNGSSRTAQPRELIAPPKTVKPPEDQLKSENLEVSSSFNYSVLQHLGQFPPLMPNKQIAESANSSSPQSSAGGKPAMSYASALRAPPKPRPPPEQAKKSSDPLSLFQELSLGSSSGSNGFYSYFK

SEQ ID NO: 5260 - protein, 100 aa, Homo sapiens
MLSLEETEAGEEGSRITLPGGGGCRRGDFPWDDEDFRSLALLGAGVAMGFFYLYFRDPGREITWKHFVQYYLARGLVDRLEVVNKQSVRVIPAPGTSSET

SEQ ID NO: 5261 - protein, 199 aa, Homo sapiens
MLSLEETEAGEEGSRITLPGGGGCRRGDFPWDDEDFRSLALLGAGVAMGFFYLYFRDPGREITWKHFVQYYLARGLVDRLEVVNKQSVRVIPAPGTSSEGAMLTGPPGTGKTLLAKATAGEATVPFITVNGSEFLEMFIGVGPARGSTLPPTSWCWLAPTALTSWTRPSCGLAGFIARFTLVPLTLKAGPPSLRSTCAH

SEQ ID NO: 5262 - protein, 169 aa, Homo sapiens
MICLVLTIFANLFPAACTGAHERTFLAVKPDGVQRRLVGEIVRRFERKGFKLVALKLVQASEELLREHYAELRERPFYGRLVKYMASGPVVAMVWQGLDVVRTSRALIGATNPADAPPGTIRGDFCIEVGKNLIHGSDSVESARREIALWFRADELLCWEDSAGHWLYE

SEQ ID NO: 5263 - protein, 440 aa, Homo sapiens
MALLVLGLVSCTFFLAVNGLYSSSDDVIELTPSNFNREVIQSDSLWLVEFYAPWCGHCQRLTPEWKKAATALKDVVKVGAVDADKHHSLGGQYGVQGFPTIKIFGSNKNRPEDYQGGRTGEAIVDAALSALRQLVKDRLGGRSGGYSSGKQGRSDSSSKKDVIELTDDSFDKNVLDSEDVWMVEFYAPWCGHCKNLEPEWAAAASEVKEQTKGKVKLAAVDATVNQVLASRYGIRGFPTIKIFQKGESPVDYDGGRTRSDIVSRALDLFSDNAPPPELLEIINEDIAKRTCEEHQLCVVAVLPHILDTGAAGRNSYLEVLLKLADKYKKKMWGWLWTEAGAQSELETALGIGGFGYPAMAAINARKMKFALLKGSFSEQGINEFLRELSFGRGSTAPVGGGAFPTIVEREPWDGRDGELPVEDDIDLSDVELDDLGKDEL

SEQ ID NO: 5264 - protein, 2243 aa, Homo sapiens
MNIIRENKDLACFYTTKHSWRGKYKRVFSVGTHAITTYNPNTLEVTNQWPYGDICSISPVGKGQGTEFNLTFRKGSGKKSETLKFSTEHRTELLTEALRFRTDFSEGKITGRRYNCYKHHWSDSRKPVILEVTPGGFDQINPATNRVLCSYDYRNIEGFVDLSDYQGGFCILYGGFSRLHLFASEQREEIIKSAIDHAGNYIGISLRIRKEPLEFEQYLNLRFGKYSTDESITSLAEFVVQKISPRHSEPVKRVLALTETCLVERDPATYNIATLKPLGEVFALVCDSENPQLFTIEFIKGQVRKYSSTERDSLLASLLDGVRASGNRDVCVKMTPTHKGQRWGLLSMPVDEEVESLHLRFLATPPNGNFADAVFRFNANISYSGVLHAVTQDGLFSENKEKLINNAITALLSQEGDVVASNAELESQFQAVRRLVASKAGFLAFTQLPKFRERLGVKVVKALKRSNNGIIHAAVDMLCALMCPMHDDYDLRQEQLNKASLLSSKKFLENLLEKFNSHVDHGTGALVISSLLDFLTFALCAPYSETTEGQQFDMLLEMVASNGRTLFKLFQHPSMAIIKGAGLVMKAIIEEGDKEIATKMQELALSEGALPRHLHTAMFTISSDQRMLTNRQLSRHLVGLWTADNATATNLLKRILPPGLLAYLESSDLVPEKDADRMHVRDNVKIAMDQYGKFNKVPEWQRLAGKAAKEVEKFAKEKVDLVLMHWRDRMGIAQKENINQKPVVLRKRRQRIKIEANWDLFYYRFGQDHARSNLIWNFKTREELKDTLESEMRAFNIDRELGSANVISWNHHEFEVKYECLAEEIKIGDYYLRLLLEEDENEESGSIKRSYEFFNELYHRFLLTPKVNMKCLCLQALAIVYGRCHEEIGPFTDTRYIIGMLERCTDKLERDRLILFLNKLILNKKNVKDLMDSNGIRILVDLLTLAHLHVSRATVPLQSNVIEAAPDMKRESEKEWYFGNADKERSGPYGFHEMQELWTKGMLNAKTRCWAQGMDGWRPLQSIPQLKWCLLASGQAVLNETDLATLILNMLITMCGYFPSRDQDNAIIRPLPKVKRLLSDSTCLPHIIQLLLTFDPILVEKVAILLYHIMQDNPQLPRLYLSGVFFFIMMYTGSNVLPVARFLKYTHTKQAFKSEETKGQDIFQRSILGHILPEAMVCYLENYEPEKFSEIFLGEFDTPEAIWSSEMRRLMIEKIAAHLADFTPRLQSNTRALYQYCPIPIINYPQLENELFCNIYYLKQLCDTLRFPDWPIKDPVKLLKDTLDAWKKEVEKKPPMMSIDDAYEVLNLPQGQGPHDESKIRKAYFRLAQKYHPDKNPEGRDMFEKVNKAYEFLCTKSAKIVDGPDPENIILILKTQSILFNRHKEDLQPYKYAGYPMLIRTITMETSDDLLFSKESPLLPAATELAFHTVNCSALNAEELRRENGLEVLQEAFSRCVAVLTRSSKPSDMSVQVCGYISKCYSVAAQFEECREKITEMPSIIKDLCRVLYFGKSIPRVAALGVECVSSFAVDFWLQTHLFQAGILWYLLGFLFNYDYTLEESGIQKSEETNQQEVANSLAKLSVHALSRLGGYLAEEQATPENPTIRKSLAGMLTPYVARKLAVASVTEILKMLNSNTESPYLIWNNSTRAELLEFLESQQENMIKKGDCDKTYGSEFVYSDHAKELIVGEIFVRVYNEVPTFQLEVPKAFAASLLDYIGSQAQYLHTFMAITHAAKVESEQHGDRLPRVEMALEALRNVIKYNPGSESECIGHFKLIFSLLRVHGAGQVQQLALEVVNIVTSNQDCVNNIAESMVLSSLLALLHSLPSSRQLVLETLYALTSSTKIIKEAMAKGALIYLLDMFCNSTHPQVRAQTAELFAKMTADKLIGPKVRITLMKFLPSVFMDAMRDNPEAAVHIFEGTHENPELIWNDNSRDKVSTTVREMMLEHFKNQQDNPEANWKLPEDFAVVFGEAEGELAVGGVFLRIFIAQPAWVLRKPREFLIALLEKLTELLEKNNPHGETLETLTMATVCLFSAQPQLADQVPPLGHLPKVIQAMNHRNNAIPKSAIRVIHALSENELCVRAMASLETIGPLMNGMKKRADTVGLACEAINRMFQKEQSELVAQALKADLVPYLLKLLEGIGLENLDSPAATKAQIVKALKAMTRSLQYGEQVNEILCRSSVWSAFKDQKHDLFISESQTAGYLTGPGVAGYLTAGTSTSVMSNLPPPVDHEAGDLGYQT

SEQ ID NO: 5265 - protein, 291 aa, Homo sapiens
MERKRWECPALPQGWEREEVPRRSGLSAGHRDVFYYSPSGKKFRSKPQLARYLGGSMDLSTFDFRTGKMLMSKMNKSRQRVRYDSSNQVKGKPDLNTALPVRQTASIFKQPVTKITNHPSNKVKSDPQKAVDQPRQLFWEKKLSGLNAFDIAEELVKTMDLPKGLQGVGPGCTDETLLSAIASALHTSTMPITGQLSAAVEKNPGVWLNTTQPLCKAFMVTDEDIRKQEELVQQVRKRLEEALMADMLAHVEELARDGEAPLDKACAEDDDEEDEEEEEEEPDPDPEMEHV

SEQ ID NO: 5266 - protein, 309 aa, Homo sapiens
MPRHCSAAGCCTRDTRETRNRGISFHRLPKKDNPRRGLWLANCQRLDPSGQGLWDPASEYIYFCSKHFEEDCFELVGISGYHRLKEGAVPTIFESFSKLRRTTKTKGHSYPPGPAEVSRLRRCRKRCSEGRGPTTPFSPPPPADVTCFPVEEASAPATLPASPAGRLEPGLSSPFSDLLGPLGAQADEAGCSAQPSPERQPSPLEPRPVSPSAYMLRLPPPAGAYIQNEHSYQVGSALLWKRRAEAALDALDKAQRQLQACKRREQRLRLRLTKLQQERAREKRAQADARQTLKEHVQDFAMQLSSSMA

SEQ ID NO: 5267 - protein, 95 aa, Homo sapiens
MLRLPPPAGAYIQNEHSYQVGSALLWKRRAEAALDALDKAQRQLQACKRREQRLRLRLTKLQQERAREKRAQADARQTLKEHVQDFAMQLSSSMA

SEQ ID NO: 5268 - protein, 309 aa, Homo sapiens; identical to SEQ ID NO: 5266

SEQ ID NO: 5269 - protein, 372 aa, Homo sapiens
MTKGDFIDEEVEDMYLVDFTQKIIDKRKEMEASGAHRDSQKAGERDDDEENLPEGEIPPPQDPSEEWVDYVDSLGRSRRCMRKDLPDLLEMDKNLQGRLFISPANEKTLLSEDMRKELQRQQWEEEEREALKRPMGPVHYEDIRENEARQLGVGYFAFARDKELRNKQMKTLEMLREQTTDQRTKRENIKEKRKAILEARLAKLRQKKMKKSKEGGTEEENRDGDVIGPLPPEPEAVPTPRPAAQSSKVEVIVQERKDTKPGVPHIREWDRGKEFSFGYWSKRQSDLRAERDPEFAPPSDYFVGQKRTGFSSSQAWSRPGPAQSDPGQCPDQSHGPSPEHTSPTPAPDNPPQAPTVTFKTLDDMISYYKQVT

SEQ ID NO: 5270 - protein, 1077 aa, Homo sapiens
MDTDSQRSHLSSFTMKLMDKFHSPKIKRTPSKKGKPAEVSVKIPEKPVNKEATDRFLPEGYPLPLDLEQQAVEFMSTSAVASRSQRQKNLSWLEEKEKEVVSALRYFKTIVDKMAIDKKVLEMLPGSASKVLEAILPLVQNDPRIQHSSALSSCYSRVYQSLANLIRWSDQVMLEGVNSEDKEMVTTVKGVIKAVLDGVKELVRLTIEKQGRPSPTSPVKPSSPASKPDGPAELPLTDREVEILNKTTGMSQSTELLPDATDEEVAPPKPPLPGIRVVDNSPPPALPPKKRQSAPSPTRVAVVAPMSRATSGSSLPVGINRQDFDVDCYAQRRLSGGSHSYGGESPRLSPCSSIGKLSKSDEQLSSLDRDSGQCSRNTSCETLDHYDPDYEFLQQDLSNADQIPQQTAWNLSPLPESLGESGSPFLGPPFQLPLGGHPQPDGPLAPGQQTDTPPALPEKKRRSAASQTADGSGCRVSYERHPSQYDNISGEDLQSTAPIPSVPYAPFAAILPFQHGGSSAPVEFVGDFTAPESTGDPEKPPPLPEKKNKHMLAYMQLLEDYSEPQPSMFYQTPQNEHIYQQKNKLLMEVYGFSDSFSGVDSVQELAPPPALPPKQRQLEPPAGKDGHPRDPSAVSGVPGKDSRDGSERAPKSPDALESAQSEEEVDELSLIDHNEIMSRLTLKQEGDDGPDVRGGSGDILLVHATETDRKDLVLYCEAFLTTYRTFISPEELIKKLQYRYEKFSPFADTFKKRVSKNTFFVLVRVVDELCLVELTEEILKLLMELVFRLVCNGELSLARVLRKNILDKVDQKKLLRCATSSQPLAARGVAARPGTLHDFHSHEIAEQLTLLDAELFYKIEIPEVLLWAKEQNEEKSPNLTQFTEHFNNMSYWVRSIIMLQEKAQDRERLLLKFIKIMKHLRKLNNFNSYLAILSALDSAPIRRLEWQKQTSEGLAEYCTLIDSSSSFRAYRAALSEVEPPCIPYLGLILQDLTFVHLGNPDYIDGKVNFSKRWQQFNILDSMRCFQQAHYDMRRNDDIINFFNDFSDHLAEEALWELSLKIKPRNITRRKTDREEKT

SEQ ID NO: 5271 - protein, 1095 aa, Homo sapiens
MGNAIEKQKPLKRSHLYPWKQDSQRSHLSSFTMKLMDKFHSPKIKRTPSKKGKPAEVSVKIPEKPVNKEATDRFLPEGYPLPLDLEQQAVEFMSTSAVASRSQRQKNLSWLEEKEKEVVSALRYFKTIVDKMAIDKKVLEMLPGSASKVLEAILPLVQNDPRIQHSSALSSCYSRVYQSLANLIRWSDQVMLEGVNSEDKEMVTTVKGVIKAVLDGVKELVRLTIEKQGRPSPTSPVKPSSPASKPDGPAELPLTDREVEILNKTTGMSQSTELLPDATDEEVAPPKPPLPGIRVVDNSPPPALPPKKRQSAPSPTRVAVVAPMSRATSGSSLPVGINRQDFDVDCYAQRRLSGGSHSYGGESPRLSPCSSIGKLSKSDEQLSSLDRDSGQCSRNTSCETLDHYDPDYEFLQQDLSNADQIPQQTAWNLSPLPESLGESGSPFLGPPFQLPLGGHPQPDGPLAPGQQTDTPPALPEKKRRSAASQTADGSGCRVSYERHPSQYDNISGEDLQSTAPIPSVPYAPFAAILPFQHGGSSAPVEFVGDFTAPESTGDPEKPPPLPEKKNKHMLAYMQLLEDYSEPQPSMFYQTPQNEHIYQQKNKLLMEVYGFSDSFSGVDSVQELAPPPALPPKQRQLEPPAGKDGHPRDPSAVSGVPGKDSRDGSERAPKSPDALESAQSEEEVDELSLIDHNEIMSRLTLKQEGDDGPDVRGGSGDILLVHATETDRKDLVLYCEAFLTTYRTFISPEELIKKLQYRYEKFSPFADTFKKRVSKNTFFVLVRVVDELCLVELTEEILKLLMELVFRLVCNGELSLARVLRKNILDKVDQKKLLRCATSSQPLAARGVAARPGTLHDFHSHEIAEQLTLLDAELFYKIEIPEVLLWAKEQNEEKSPNLTQFTEHFNNMSYWVRSIIMLQEKAQDRERLLLKFIKIMKHLRKLNNFNSYLAILSALDSAPIRRLEWQKQTSEGLAEYCTLIDSSSSFRAYRAALSEVEPPCIPYLGLILQDLTFVHLGNPDYIDGKVNFSKRWQQFNILDSMRCFQQAHYDMRRNDDIINFFNDFSDHLAEEALWELSLKIKPRNITRRKTDREEKT

SEQ ID NO: 5272 - protein, 153 aa, Homo sapiens
MAVESRVTQEEIKKEPEKPIDREKTCPLLLRVFTTNNGRHHRMDEFSRGNVPSSELQIYTWMDATLKELTSLVKEVYPEARKKGTHFNFAIVFTDVKRPGYRVKEIGSTMSGRKGTDDSMTLQSQKFQIGDYLDIAITPPNRAPPPSGRMRPY

SEQ ID NO: 5273 - protein, 493 aa, Homo sapiens
MSVDMNSQGSDSNEEDYDPNCEEEEEEEEDDPGDIEDYYVGVASDVEQQGADAFDPEEYQFTCLTYKESEGALNEHMTSLASVLKVSHSVAKLILVNFHWQVSEILDRYKSNSAQLLVEARVQPNPSKHVPTSHPPHHCAVCMQFVRKENLLSLACQHQFCRSCWEQHCSVLVKDGVGVGVSCMAQDCPLRTPEDFVFPLLPNEELREKYRRYLFRDYVESHYQLQLCPGADCPMVIRVQEPRARRVQCNRCNEVFCFKCRQMYHAPTDCATIRKWLTKCADDSETANYISAHTKDCPKCNICIEKNGGCNHMQCSKCKHDFCWMCLGDWKTHGSEYYECSRYKENPDIVNQSQQAQAREALKKYLFYFERWENHNKSLQLEAQTYQRIHEKIQERVMNNLGTWIDWQYLQNAAKLLAKCRYTLQYTYPYAYYMESGPRKKLFEYQQAQLEAEIENLSWKVERADSYDRGDLENQMHIAEQRRRTLLKDFHDT

SEQ ID NO: 5274 - protein, 152 aa, Homo sapiens
MANCERTFIAIKPDGVQRGLVGEIIKRFEQKGFRLVGLKFMQASEDLLKEHYVDLKDRPFFAGLVKYMHSGPVVAMVWEGLNVVKTGRVMLGETNPADSKPGTIRGDFCIQVGRNIIHGSDSVESAEKEIGLWFHPEELVDYTSCAQNWIYE

SEQ ID NO: 5275 - protein, 177 aa, Homo sapiens
MVLLSTLGIVFQGEGPPISSCDTGTMANCERTFIAIKPDGVQRGLVGEIIKRFEQKGFRLVGLKFMQASEDLLKEHYVDLKDRPFFAGLVKYMHSGPVVAMVWEGLNVVKTGRVMLGETNPADSKPGTIRGDFCIQVGRNIIHGSDSVESAEKEIGLWFHPEELVDYTSCAQNWIYE

SEQ ID NO: 5276 - protein, 460 aa, Homo sapiens
MASLLQSDRVLYLVQGEKKVRAPLSQLYFCRYCSELRSLECVSHEVDSHYCPSCLENMPSAEAKLKKNRCANCFDCPGCMHTLSTRATSISTQLPDDPAKTTMKKAYYLACGFCRWTSRDVGMADKSVASGGWQEPENPHTQRMNKLIEYYQQLAQKEKVERDRKKLARRRNYMPLAFSDKYGLGTRLQRPRAGASISTLAGLSLKEGEDQKEIKIEPAQAVDEVEPLPEDYYTRPVNLTEVTTLQQRLLQPDFQPVCASQLYPRHKHLLIKRSLRCRKCEHNLSKPEFNPTSIKFKIQLVAVNYIPEVRIMSIPNLRYMKESQVLLTLTNPVENLTHVTLFECEEGDPDDINSTAKVVVPPKELVLAGKDAAAEYDELAEPQDFQDDPDIIAFRKANKVGIFIKVTPQREEGEVTVCFKMKHDFKNLAAPIRPIEESDQGTEVIWLTQHVELSLGPLLP

SEQ ID NO: 5277 - protein, 494 aa, Homo sapiens
MLPKRRRARVGSPSGDAASSTPPSTRFPGVAIYLVEPRMGRSRRAFLTGLARSKGFRVLDACSSEATHVVMEETSAEEAVSWQERRMAAAPPGCTPPALLDISWLTESLGAGQPVPVECRHRLEVAGPRKGPLSPAWMPAYACQRPTPLTHHNTGLSEALEILAEAAGFEGSEGRLLTFCRAASVLKALPSPVTTLSQLQGLPHFGEHSSRVVQELLEHGVCEEVERVRRSERYQTMKLFTQIFGVGVKTADRWYREGLRTLDDLREQPQKLTQQQKAGLQHHQDLSTPVLRSDVDALQQVVEEAVGQALPGATVTLTGGFRRGKLQGHDVDFLITHPKEGQEAGLLPRVMCRLQDQGLILYHQHQHSCCESPTRLAQQSHMDAFERSFCIFRLPQPPGAAVGGSTRPCPSWKAVRVDLVVAPVSQFPFALLGWTGSKLFQRELRRFSRKEKGLWLNSHGLFDPEQKTFFQAASEEDIFRHLGLEYLPPEQRNA

SEQ ID NO: 5278 - protein, 492 aa, Homo sapiens [sequence omitted]

SEQ ID NO: 5279 - protein, 246 aa, Homo sapiens
MFPVKVKVEKSELEMAKARNQLDAVLQCLLEKSHMDRERLDEEAGKTPSDTHNKDCSIAATGKRPSARFPHQRRKKRREMDDGLAEGGPQRSNTYVIKLFDRSVDLAQFSENTPLYPICRAWMRNSPSVRERECSPSSPLPPLPEDEEGSEVTNSKSRDVYKLPPPTPPGPPGDACRSRIPSPLQPEMQGTPDDEPSEPEPSPSTLIYRNMQRWKRIRQRWKEASHRNQLRYSESMKILREMYERQ

SEQ ID NO: 5280 - protein, 329 aa, Homo sapiens
MTGNAGEWCLMESDPGVFTELIKGFGCRGAQVEEIWSLEPENFEKLKPVHGLIFLFKWQPGEEPAGSVVQDSRLDTIFFAKQVINNACATQAIVSVLLNCTHQDVHLGETLSEFKEFSQSFDAAMKGLALSNSDVIRQVHNSFARQQMFEFDTKTSAKEEDAFHFVSYVPVNGRLYELDGLREGPIDLGACNQDDWISAVRPVIEKRIQKYSEGEIRFNLMAIVSDRKMIYEQKIAELQRQLAEEEPMDTDQGNSMLSAIQSEVAKNQMLIEEEVQKLKRYKIENIRRKHNYLPFIMELLKTLAEHQQLIPLVEKAKEKQNAKKAQETK

SEQ ID NO: 5281 - protein, 274 aa, Homo sapiens
MRAAGVGLVDCHCHLSAPDFDRDLDDVLEKAKKANVVALVAVAEHSGEFEKIMQLSERYNGFVLPCLGVHPVQGLPPEDQRSVTLKDLDVALPIIENYKDRLLAIGEVGLDFSPRFAGTGEQKEEQRQVLIRQIQLAKRLNLPVNVHSRSAGRPTINLLQEQGAEKVLLHAFDGRPSVAMEGVRAGYFFSIPPSIIRSGQKQKLVKQLPLTSICLETDSPALGPEKQVRNEPWNISISAEYIAQVKGISVEEVIEVTTQNALKLFPKLRHLLQK

SEQ ID NO: 5282 - protein, 144 aa, Homo sapiens
MRAAGVGLVDCHCHLSAPDFDRDLDDVLEKAKKANVVALVAVAEHSGEFEKIMQLSERYNGFVLPCLGVHPVQGLPPEDQRSVTLKDLDVALPIIENYKDRLLAIGEVGLDFSPRFAGTGEQKEEQRQVLIRQIQLAKRLNLPV

SEQ ID NO: 5283 - protein, 191 aa, Homo sapiens
MRAAGVGLVDCHCHLSAPDFDRDLDDVLEKAKKANVVALVAVAEHSGEFEKIMQLSERYNGFVLPCLGVHPVQGLPPEDQRSVTLKDLDVALPIIENYKDRLLAIGEVGLDFSPRFAGTGEQKEEQRQVLIRQIQLAKRLNLPVNVHSRSAGRPTINLLQEQAETCETIAFNFYMLRNRFTCTRTRKTGTE

SEQ ID NO: 5284 - protein, 281 aa, Homo sapiens
MRAAGVGLVDCHCHLSAPDFDRDLDDVLEKAKKANVVALVAVAEHSGEFEKIMQLSERYNGFVLPCLGVHPVQGLPPEDQRSVTLKDLDVALPIIENYKDRLLAIGEVGLDFSPRFAGTGEQKEEQRQVLIRQIQLAKRLNLPVNVHSRSAGRPTINLLQEQGAEKVLLHAFDGRPSVAMEGVRAGYFFSIPPSIIRSGQLLSLFSKKQKLVKQLPLTSICLETDSPALGPEKQVRNEPWNISISAEYIAQVKGISVEEVIEVTTQNALKLFPKLRHLLQK

SEQ ID NO: 5285 - protein, 274 aa, Homo sapiens; identical to SEQ ID NO: 5281

SEQ ID NO: 5286 - protein, 144 aa, Homo sapiens; identical to SEQ ID NO: 5282

SEQ ID NO: 5287 - protein, 191 aa, Homo sapiens; identical to SEQ ID NO: 5283

SEQ ID NO: 5288 - protein, 281 aa, Homo sapiens; identical to SEQ ID NO: 5284

SEQ ID NO: 5289 - protein, 288 aa, Homo sapiens
MASLQRSRVLRCCSCRLFQAHQVKKSVKWTCKACGEKQSFLQEKSQPSESRWLKYLEKDSQELELEGTGVCFSKQPSSKMEEPGPRFSQDLPRKRKWSRSTVQPPCSRGVQDSGGSEVAWGPQKGQAGLTWKVKQGSSPCLQENSADCSAGELRGPGKELWSPIQQVTATSSKWAQFVLPPRKSSHVDSEQPRSLQRDPRPAGPAQAKQGTPRAQASREGLSRPTAAVQLPRATHPVTSGSERPCGKTSWDARTPWAEGGPLVLEAQNPRPTRLCDLFITGEDFDDDV

SEQ ID NO: 5290 - protein, 51 aa, Homo sapiens
MASLQRSRVLRCCSCRLFQAHQVKKSVKWTCKACGEKQSFLQVSRRNCQCQ

SEQ ID NO: 5291 - protein, 85 aa, Homo sapiens
MASLQRSRVLRCCSCRLFQAHQVKKSVKWTCKACGEKQSFLQSSPDTELLLPSFLFLQEVKWMEQNLERLMVKALVLIVDAMSKS

SEQ ID NO: 5292 - protein, 343 aa, Homo sapiens
MASLQRSRVLRCCSCRLFQAHQVKKSVKWTCKACGEKQSFLQAYGEGSGADCRRHVQKLNLLQGQVSELPLRSLEETVSASEEENVGHQQAGNVKQQEKSQPSESRWLKYLEKDSQELELEGTGVCFSKQPSSKMEEPGPRFSQDLPRKRKWSRSTVQPPCSRGVQDSGGSEVAWGPQKGQAGLTWKVKQGSSPCLQENSADCSAGELRGPGKELWSPIQQVTATSSKWAQFVLPPRKSSHVDSEQPRSLQRDPRPAGPAQAKQGTPRAQASREGLSRPTAAVQLPRATHPVTSGSERPCGKTSWDARTPWAEGGPLVLEAQNPRPTRLCDLFITGEDFDDDV

SEQ ID NO: 5293 - protein, 251 aa, Homo sapiens
MSFLGGFFGPICEIDIVLNDGETRKMAEMKTEDGKVEKHYLFYDGESVSGKVNLAFKQPGKRLEHQGIRIEFVGQIELFNDKSNTHEFVNLVKELALPGELTQSRSYDFEFMQVEKPYESYIGANVRLRYFLKVTIVRRLTDLVKEYDLIVHQLATYPDVNNSIKMEVGIEDCLHIEFEYNKSKYHLKDVIVGKIYFLLVRIKIQHMELQLIKKEITGIGPSTTTETETIAKYEIMDGAPVKGDNFMEKSS

SEQ ID NO: 5294 - protein, 327 aa, Homo sapiens
MSFLGGFFGPICEIDIVLNDGETRKMAEMKTEDGKVEKHYLFYDGESVSGKVNLAFKQPGKRLEHQGIRIEFVGQIELFNDKSNTHEFVNLVKELALPGELTQSRSYDFEFMQVEKPYESYIGANVRLRYFLKVTIVRRLTDLVKEYDLIVHQLATYPDVNNSIKMEVGIEDCLHIEFEYNKSKYHLKDVIVGKIYFLLVRIKIQHMELQLIKKEITGIGPSTTTETETIAKYEIMDGAPVKGESIPIRLFLAGYDPTPTMRDVNKKFSVRYFLNLVLVDEEDRRYFKQQEIILWRKAPEKLRKQRTNFHQRFESPESQASAEQPEM

SEQ ID NO: 5295 - protein, 275 aa, Homo sapiens
MSAEVKVTGQNQEQFLLLAKSAKGAALATLIHQVLEAPGVYVFGELLDMPNVRELAESDFASTFRLLTVFAYGTYADYLAEARNLPPLTEAQKNKLRHLSVVTLAAKVKCIPYAVLLEALALRNVRQLEDLVIEAVYADVLRGSLDQRNQRLEVDYSIGRDIQRQDLSAIARTLQEWCVGCEVVLSGIEEQVSRANQHKEQQLGLKQQIESEVANLKKTIKVTTAAAAAATSQDPEQHLTELREPAPGTNQRQPSKKASKGKGLRGSAKIWSKSN

SEQ ID NO: 5296 - protein, 145 aa, Homo sapiens
MKFNPFVTSDRSKNRKRHFNAPSHVRRKIMSSPLSKELRQKYNVRSMPIRKDDEVQVVRGHYKGQQIGKVVQVYRKKYVIYIERVQREKANGTTVHVGIHPSKVVITRLKLDKDRKKILERKAKSRQVGKEKGKYKEELIEKMQE

SEQ ID NO: 5297 - protein, 590 aa, Homo sapiens
MEVIHGRPYCCRELEGADILSNTFYSNELHNPLQTVTRPTASEDRYQELRESLQQCRLPWGAEREYGGIIPISLPEDHRPKYEPPRVMGKGHQHYGFGGETWPRKLPVEQFYYLTQNKKSDVYGNDSLIPKPPNSTVGEICLPYPIEHPYHTHICRGAMFPTFTSPEDLYTGIKARTQQPFPPTVPTKAYDSTVLKTRGNPYRYELIDIPMDSKKKALTWPGQGVYYDFPRGVEKNKPVFYPKPPKTFAPNTSLNSWDPICSAKEANIQRNLERSHWLTSYTHDFTGLGPMDPLELDDYHEKMVAELTRKIGFDPEPQEKFHPVFKPPRPLEGRIARLIQNRRSLEAIVQQRPRSCPDCTPRVLCNFHTFVPSSKEMVALSDNIPAGVTHKNQDIEEKIIEEQSLLSTYELPSCYPTKDLTSIYDIKPFPKITDTKKTEDLYWRQQSLKTQPTPYCKPDHWIHYENLKSPLRDQYNMCPDPVSLSKPSVLQNKQDTEAFTLEHFLSKPEEELFLNMENNEETRPVLGWIPRAGVTKPQTNLLELKNSFSKTGAQKRFHKSILEDHKDLRDNEHSGMKHQFYGHNSYYFYN

SEQ ID NO: 5298 - protein, 1476 aa, Homo sapiens
MEGGKGPRLRDFLSGSLATWALGLAGLVGEAEDSEGEEEEEEEEPPLWLEKRFLRLSDGALLLRVLGIIAPSSRGGPRMLRGLDGPAAWRVWNLNHLWGRLRDFYQEELQLLILSPPPDLQTLGFDPLSEEAVEQLEGVLRLLLGASVQCEHRELFIRHIQGLSLEVQSELAAAIQEVTQPGAGVVLALSGPDPGELAPAELEMLSRSLMGTLSKLARERDLGAQRLAELLLEREPLCLRPEAPSRAPAEGPSHHLALQLANAKAQLRRLRQELEEKAELLLDSQAEVQGLEAEIRRLRQEAQALSGQAKRAELYREEAEALRERAGRLPRLQEELRRCRERLQAAEAYKSQLEEERVLSGVLEASKALLEEQLEAARERCARLHETQRENLLLRTRLGEAHAELDSLRHQVDQLAEENVELELELQRSLEPPPGSPGEAPLAGAAPSLQDEVREAEAGRLRTLERENRELRGLLQVLQGQPGGQHPLLEAPREDPVLPVLEEAPQTPVAFDHSPQGLVQKARDGGPQALDLAPPALDSVLEASAECPQAPDSDPQEAESPLQAAAMDPQASDWSPQESGSPVETQESPEKAGRRSSLQSPASVAPPQGPGTKIQAPQLLGGETEGREAPQGELVPEAWGLRQEGPEHKPGPSEPSSVQLEEQEGPNQGLDLATGQAEAREHDQRLEGTVRDPAWQKPQQKSEGALEVQVWEGPIPGESLASGVAEQEALREEVAQLRRKAEALGDELEAQARKLEAQNTEAARLSKELAQARRAEAEAHREAEAQAWEQARLREAVEAAGQELESASQEREALVEALAAAGRERRQWEREGSRLRAQSEAAEERMQVLESEGRQHLEEAERERREKEALQAELEKAVVRGKELGARLEHLQRELEQAALERQEFLREKESQHQRYQGLEQRLEAELQAAATSKEEALMELKTRALQLEEELFQLRQGPAGLGPKKRAEPQLVETQNVRLIEVERSNAMLVAEKAALQGQLQHLEGQLGSLQGRAQELLLQSQRAQEHSSRLQAEKSVLEIQGQELHRKLEVLEEEVRAARQSQEETRGQQQALLRDHKALAQLQRRQEAELEGLLVRHRDLKANMRALELAHRELQGRHEQLQAQRASVEAQEVALLAERERLMQDGHRQRGLEEELRRLQSEHDRAQMLLAELSRERGELQGERGELRGRLARLELERAQLEMQSQQLRESNQQLDLSACRLTTQCELLTQLRSAQEEENRQLLAEVQALSRENRELLERSLESRDHLHREQREYLDQLNALRREKQKLVEKIMDQYRVLEPVPLPRTKKGSWLADKVKRLMRPRREGGPPGGLRLGADGAGSTESLGGPPETELPEGREADGTGSPSPAPMRRAQSSLCLRDETLAGGQRRKLSSRFPVGRSSESFSPGDTPRQRFRQRHPGPLGAPVSHSKGPGVGWENSAETLQEHETDANREGPEVQEPEKRPLTPSLSQ

SEQ ID NO: 5299 - protein, 2647 aa, Homo sapiens
MSSSHSRAGQSAAGAAPGGGVDTRDAEMPATEKDLAEDAPWKKIQQNTFTRWCNEHLKCVSKRIANLQTDLSDGLRLIALLEVLSQKKMHRKHNQRPTFRQMQLENVSVALEFLDRESIKLVSIDSKAIVDGNLKLILGLIWTLILHYSISMPMWDEEEDEEAKKQTPKQRLLGWIQNKLPQLPITNFSRDWQSGRALGALVDSCAPGLCPDWDSWDASKPVTNAREAMQQADDWLGIPQVITPEEIVDPNVDEHSVMTYLSQFPKAKLKPGAPLRPKLNPKKARAYGPGIEPTGNMVKKRAEFTVETRSAGQGEVLVYVEDPAGHQEEAKVTANNDKNRTFSVWYVPEVTGTHKVTVLFAGQHIAKSPFEVYVDKSQGDASKVTAQGPGLEPSGNIANKTTYFEIFTAGAGTGEVEVVIQDPMGQKGTVEPQLEARGDSTYRCSYQPTMEGVHTVHVTFAGVPIPRSPYTVTVGQACNPSACRAVGRGLQPKGVRVKETADFKVYTKGAGSGELKVTVKGPKGEERVKQKDLGDGVYGFEYYPMVPGTYIVTITWGGQNIGRSPFEVKVGTECGNQKVRAWGPGLEGGVVGKSADFVVEAIGDDVGTLGFSVEGPSQAKIECDDKGDGSCDVRYWPQEAGEYAVHVLCNSEDIRLSPFMADIRDAPQDFHPDRVKARGPGLEKTGVAVNKPAEFTVDAKHGGKAPLRVQVQDNEGCPVEALVKDNGNGTYSCSYVPRKPVKHTAMVSWGGVSIPNSPFRVNVGAGSHPNKVKVYGPGVAKTGLKAHEPTYFTVDCAEAGQGDVSIGIKCAPGVVGPAEADIDFDIIRNDNDTFTVKYTPRGAGSYTIMVLFADQATPTSPIRVKVEPSHDASKVKAEGPGLSRTGVELGKPTHFTVNAKAAGKGKLDVQFSGLTKGDAVRDVDIIDHHDNTYTVKYTPVQQGPVGVNVTYGGDPIPKSPFSVAVSPSLDLSKIKVSGLGEKVDVGKDQEFTVKSKGAGGQGKVASKIVGPSGAAVPCKVEPGLGADNSVVRFLPREEGPYEVEVTYDGVPVPGSPFPLEAVAPTKPSKVKAFGPGLQGGSAGSPARFTIDTKGAGTGGLGLTVEGPCEAQLECLDNGDGTCSVSYVPTEPGDYNINILFADTHIPGSPFKAHVVPCFDASKVKCSGPGLERATAGEVGQFQVDCSSAGSAELTIEICSEAGLPAEVYIQDHGDGTHTITYIPLCPGAYTVTIKYGGQPVPNFPSKLQVEPAVDTSGVQCYGPGIEGQGVFREATTEFSVDARALTQTGGPHVKARVANPSGNLTETYVQDRGDGMYKVEYTPYEEGLHSVDVTYDGSPVPSSPFQVPVTEGCDPSRVRVHGPGIQSGTTNKPNKFTVETRGAGTGGLGLAVEGPSEAKMSCMDNKDGSCSVEYIPYEAGTYSLNVTYGGHQVPGSPFKVPVHDVTDASKVKCSGPGLSPGMVRANLPQSFQVDTSKAGVAPLQVKVQGPKGLVEPVDVVDNADGTQTVNYVPSREGPYSISVLYGDEEVPRSPFKVKVLPTHDASKVKASGPGLNTTGVPASLPVEFTIDAKDAGEGLLAVQITDPEGKPKKTHIQDNHDGTYTVAYVPDVTGRYTILIKYGGDEIPFSPYRVRAVPTGDASKCTVTVSIGGHGLGAGIGPTIQIGEETVITVDTKAAGKGKVTCTVCTPDGSEVDVDVVENEDGTFDIFYTAPQPGKYVICVRFGGEHVPNSPFQVTALAGDQPSVQPPLRSQQLAPQYTYAQGGQQTWAPERPLVGVNGLDVTSLRPFDLVIPFTIKKGEITGEVRMPSGKVAQPTITDNKDGTVTVRYAPSEAGLHEMDIRYDNMHIPGSPLQFYVDYVNCGHVTAYGPGLTHGVVNKPATFTVNTKDAGEGGLSLAIEGPSKAEISCTDNQDGTCSVSYLPVLPGDYSILVKYNEQHVPGSPFTARVTGDDSMRMSHLKVGSAADIPINISETDLSLLTATVVPPSGREEPCLLKRLRNGHVGISFVPKETGEHLVHVKKNGQHVASSPIPVVISQSEIGDASRVRVSGQGLHEGHTFEPAEFIIDTRDAGYGGLSLSIEGPSKVDINTEDLEDGTCRVTYCPTEPGNYIINIKFADQHVPGSPFSVKVTGEGRVKESITRRRRAPSVANVGSHCDLSLKIPEISIQDMTAQVTSPSGKTHEAEIVEGENHTYCIRFVPAEMGTHTVSVKYKGQHVPGSPFQFTVGPLGEGGAHKVRAGGPGLERAEAGVPAEFSIWTREAGAGGLAIAVEGPSKAEISFEDRKDGSCGVAYVVQEPGDYEVSVKFNEEHIPDSPFVVPVASPSGDARRLTVSSLQESGLKVNQPASFAVSLNGAKGAIDAKVHSPSGALEECYVTEIDQDKYAVRFIPRENGVYLIDVKFNGTHIPGSPFKIRVGEPGHGGDPGLVSAYGAGLEGGVTGNPAEFVVNTSNAGAGALSVTIDGPSKVKMDCQECPEGYRVTYTPMAPGSYLISIKYGGPYHIGGSPFKAKVTGPRLVSNHSLHETSSVFVDSLTKATCAPQHGAPGPGPADASKVVAKGLGLSKAYVGQKSSFTVDCSKAGNNMLLVGVHGPRTPCEEILVKHVGSRLYSVSYLLKDKGEYTLVVKWGHEHIPGSPYRVVVP

SEQ ID NO: 5300 - protein, 238 aa, Homo sapiens
MAARTGHTALRRVVSGCRPKSATAAGAQAPVRNGRYLASCGILMSRTLPLHTSILPKEICARTFFKITAPLINKRKEYSERRILGYSMQEMYDVVSGVEDYKHFVPWCKKSDVISKRSGYCKTRLEIGFPPVLERYTSVVTLVKPHLVKASCTDGRLFNHLETIWRFSPGLPGYPRTCTLDFSISFEFRSLLHSQLATLFFDEVVKQMVAAFERRACKLYGPETNIPRELMLHEVHHT

SEQ ID NO: 5301 - protein, 1992 aa, Homo sapiens
MSNRPNNNPGGSLRRSQRNTAGAQPQDDSIGGRSCSSSSAVIVPQPEDPDRANTSERQKTGQVPKKDNSRGVKRSASPDYNRTNSPSSAKKPKALQHTESPSETNKPHSKSKKRHLDQEQQLKSAQSPSTSKAHTRKSGATGGSRSQKRKRTESSCVKSGSGSESTGAEERSAKPTKLASKSATSAKAGCSTITDSSSAASTSSSSSAVASASSTVPPGARVKQGKDQNKARRSRSASSPSPRRSSREKEQSKTGGSSKFDWAARFSPKVSLPKTKLSLPGSSKSETSKPGPSGLQAKLASLRKSTKKRSESPPAELPSLRRSTRQKTTGSCASTSRRGSGLGKRGAAEARRQEKMADPESNQEAVNSSAARTDEAPQGAAGAVGMTTSGESESDDSEMGRLQALLEARGLPPHLFGPLGPRMSQLFHRTIGSGASSKAQQLLQGLQASDESQQLQAVIEMCQLLVMGNEETLGGFPVKSVVPALITLLQMEHNFDIMNHACRALTYMMEALPRSSAVVVDAIPVFLEKLQVIQCIDVAEQALTALEMLSRRHSKAILQAGGLADCLLYLEFFSINAQRNALAIAANCCQSITPDEFHFVADSLPLLTQRLTHQDKKSVESTCLCFARLVDNFQHEENLLQQVASKDLLTNVQQLLVVTPPILSSGMFIMVVRMFSLMCSNCPTLAVQLMKQNIAETLHFLLCGASNGSCQEQIDLVPRSPQELYELTSLICELMPCLPKEGIFAVDTMLKKGNAQNTDGAIWQWRDDRGLWHPYNRIDSRIIEQINEDTGTARAIQRKPNPLANSNTSGYSESKKDDARAQLMKEDPELAKSFIKTLFGVLYEVYSSSAGPAVRHKCLRAILRIIYFADAELLKDVLKNHAVSSHIASMLSSQDLKIVVGALQMAEILMQKLPDIFSVYFRREGVMHQVKHLAESESLLTSPPKACTNGSGSMGSTTSVSSGTATAATHAAADLGSPSLQHSRDDSLDLSPQGRLSDVLKRKRLPKRGPRRPKYSPPRDDDKVDNQAKSPTTTQSPKSSFLASLNPKTWGRLSTQSNSNNIEPARTAGGSGLARAASKDTISNNREKIKGWIKEQAHKFVERYFSSENMDGSNPALNVLQRLCAATEQLNLQVDGGAECLVEIRSIVSESDVSSFEIQHSGFVKQLLLYLTSKSEKDAVSREIRLKRFLHVFFSSPLPGEEPIGRVEPVGNAPLLALVHKMNNCLSQMEQFPVKVHDFPSGNGTGGSFSLNRGSQALKFFNTHQLKCQLQRHPDCANVKQWKGGPVKIDPLALVQAIERYLVVRGYGRVREDDEDSDDDGSDEEIDESLAAQFLNSGNVRHRLQFYIGEHLLPYNMTVYQAVRQFSIQAEDERESTDDESNPLGRAGIWTKTHTIWYKPVREDEESNKDCVGGKRGRAQTAPTKTSPRNAKKHDELWHDGVCPSVSNPLEVYLIPTPPENITFEDPSLDVILLLRVLHAISRYWYYLYDNAMCKEIIPTSEFINSKLTAKANRQLQDPLVIMTGNIPTWLTELGKTCPFFFPFDTRQMLFYVTAFDRDRAMQRLLDTNPEINQSDSQDSRVAPRLDRKKRTVNREELLKQAESVMQDLGSSRAMLEIQYENEVGTGLGPTLEFYALVSQELQRADLGLWRGEEVTLSNPKGSQEGTKYIQNLQGLFALPFGRTAKPAHIAKVKMKFRFLGKLMAKAIMDFRLVDLPLGLPFYKWMLRQETSLTSHDLFDIDPVVARSVYHLEDIVRQKKRLEQDKSQTKESLQYALETLTMNGCSVEDLGLDFTLPGFPNIELKKGGKDIPVTIHNLEEYLRLVIFWALNEGVSRQFDSFRDGFESVFPLSHLQYFYPEELDQLLCGSKADTWDAKTLMECCRPDHGYTHDSRAVKFLFEILSSFDNEQQRLFLQFVTGSPRLPVGGFRSLNPPLTIVRKTFESTENPDDFLPSVMTCVNYLKLPDYSSIEIMREKLLIAAREGQQSFHLS

SEQ ID NO: 5302 - protein, 1075 aa, Homo sapiens
MLKPQPLQQPSQPQQPPPTQQAVARRPPGGTSPPNGGLPGPLATSAAPPGPPAAASPCLGPVAAAGSGLRRGAEGILAPQPPPPQQHQERPGAAAIGSARGQSTGKGPPQSPVFEGVYNNSRMLHFLTAVVGSTCDVKVKNGTTYEGIFKTLSSKFELAVDAVHRKASEPAGGPRREDIVDTMVFKPSDVMLVHFRNVDFNYATKDKFTDSAIAMNSKVNGEHKEKVLQRWEGGDSNSDDYDLESDMSNGWDPNEMFKFNEENYGVKTTYDSSLSSYTVPLEKDNSEEFRQRELRAAQLAREIESSPQYRLRIAMENDDGRTEEEKHSAVQRQGSGRESPSLASREGKYIPLPQRVREGPRGGVRCSSSRGGRPGLSSLPPRGPHHLDNSSPGPGSEARGINGGPSRMSPKAQRPLRGAKTLSSPSNRPSGETSVPPPPAVGRMYPPRSPKSAAPAPISASCPEPPIGSAVPTSSASIPVTSSVSDPGVGSISPASPKISLAPTDVKELSTKEPGRTLEPQELARIAGKVPGLQNEQKRFQLEELRKFGAQFKLQPSSSPENSLDPFPPRILKEEPKGKEKEVDGLLTSEPMGSPVSSKTESVSDKEDKPPLAPSGGTEGPEQPPPPCPSQTGSPPVGLIKGEDKDEGPVAEQVKKSTLNPNAKEFNPTKPLLSVNKSTSTPTSPGPRTHSTPSIPVLTAGQSGLYSPQYISYIPQIHMGPAVQAPQMYPYPVSNSVPGQQGKYRGAKGSLPPQRSDQHQPASAPPMMQAAAAAGPPLVAATPYSSYIPYNPQQFPGQPAMMQPMAHYPSQPVFAPMLQSNPRMLTSGSHPQAIVSSSTPQYPSAEQPTPQALYATVHQSYPHHATQLHAHQPQPATTPTGSQPQSQHAAPSPVQHQAGQAPHLGSGQPQQNLYHPGALTGTPPSLPPGPSAQSPQSSFPQPAAVYAIHHQQLPHGFTNMAHVTQAHVQTGITAAPPPHPGAPHPPQVMLLHPPQSHGGPPQGAVPQSGVPALSASTPSPYPYIGHPQGEQPGQAPGFPGGADDRIREFSLAGGIWHGRAEGLQVGQDARVLGGE

SEQ ID NO: 5303 - protein, 399 aa, Homo sapiens
MLKPQPLQQPSQPQQPPPTQQAVARRPPGGTSPPNGGLPGPLATSAAPPGPPAAASPCLGPVAAAGSGLRRGAEGILAPQPPPPQQHQERPGAAAIGSARGQSTGKGPPQSPVFEGVYNNSRMLHFLTAVVGSTCDVKVKNGTTYEGIFKTLSSKFELAVDAVHRKASEPAGGPRREDIVDTMVFKPSDVMLVHFRNVDFNYATKDKFTDSAIAMNSKVNGEHKEKVLQRWEGGDSNSDDYDLESDMSNGWDPNEMFKFNEENYGVKTTYDSSLSSYTVPLEKDNSEEFRQRELRAAQLAREIESSPQYRLRIAMENDDGRTEEEKHSAVQRQGSGRESPSLASREGKYIPLPHRGQGQGPAGVGGSCSAPARPHPVLPSHPLIYSPAGDGRSFIFYYL

SEQ ID NO: 5304 - protein, 1062 aa, Homo sapiens
MLKPQPLQQPSQPQQPPPTQQAVARRPPGGTSPPNGGLPGPLATSAAPPGPPAAASPCLGPVAAAGSGLRRGAEGILAPQPPPPQQHQERPGAAAIGSARGQSTGKGPPQSPVFEGVYNNSRMLHFLTAVVGSTCDVKVKNGTTYEGIFKTLSSKFELAVDAVHRKASEPAGGPRREDIVDTMVFKPSDVMLVHFRNVDFNYATKDKFTDSAIAMNSKVNGEHKEKVLQRWEGGDSNSDDYDLESDMSNGWDPNEMFKFNEENYGVKTTYDSSLSSYTVPLEKDNSEEFRQRELRAAQLAREIESSPQYRLRIAMENDDGRTEEEKHSAVQRQGSGRESPSLASREGKYIPLPQRVREGPRGGVRCSSSRGGRPGLSSLPPRGPHHLDNSSPGPGSEARGINGGPSRMSPKAQRPLRGAKTLSSPSNRPSGETSVPPPPAVGRMYPPRSPKSAAPAPISASCPEPPIGSAVPTSSASIPVTSSVSDPGVGSISPASPKISLAPTDVKELSTKEPGRTLEPQELARIAGKVPGLQNEQKRFQLEELRKFGAQFKLQPSSSPENSLDPFPPRILKEEPKGKEKEVDGLLTSEPMGSPVSSKTESVSDKEDKPPLAPSGGTEGPEQPPPPCPSQTGSPPVGLIKGEDKDEGPVAEQVKKSTLNPNAKEFNPTKPLLSVNKSTSTPTSPGPRTHSTPSIPVLTAGQSGLYSPQYISYIPQIHMGPAVQAPQMYPYPVSNSVPGQQGKYRGAKGSLPPQRSDQHQPASAPPMMQAAAAAGPPLVAATPYSSYIPYNPQQFPGQPAMMQPMAHYPSQPVFAPMLQSNPRMLTSGSHPQAIVSSSTPQYPSAEQPTPQALYATVHQSYPHHATQLHAHQPQPATTPTGSQPQSQHAAPSPVQHQAGQAPHLGSGQPQQNLYHPGALTGTPPSLPPGPSAQSPQSSFPQPAAVYAIHHQQLPHGFTNMAHVTQAHVQTGITAAPPPHPGAPHPPQVMLLHPPQSHGGPPQGAVPQSGVPALSASTPSPYPYIGHPQGEQPGQAPGFPGGADDRIPPLPPPGELKIVLAAT

SEQ ID NO: 5305 - protein, 1097 aa, Homo sapiens
MLKPQPLQQPSQPQQPPPTQQAVARRPPGGTSPPNGGLPGPLATSAAPPGPPAAASPCLGPVAAAGSGLRRGAEGILAPQPPPPQQHQERPGAAAIGSARGQSTGKGPPQSPVFEGVYNNSRMLHFLTAVVGSTCDVKVKNGTTYEGIFKTLSSKFELAVDAVHRKASEPAGGPRREDIVDTMVFKPSDVMLVHFRNVDFNYATKDKFTDSAIAMNSKVNGEHKEKVLQRWEGGDSNSDDYDLESDMSNGWDPNEMFKFNEENYGVKTTYDSSLSSYTVPLEKDNSEEFRQRELRAAQLAREIESSPQYRLRIAMENDDGRTEEEKHSAVQRQGSGRESPSLASREGKYIPLPQRVREGPRGGVRCSSSRGGRPGLSSLPPRGPHHLDNSSPGPGSEARGINGGPSRMSPKAQRPLRGAKTLSSPSNRPSGETSVPPPPAVGRMYPPRSPKSAAPAPISASCPEPPIGSAVPTSSASIPVTSSVSDPGVGSISPASPKISLAPTDVKELSTKEPGRTLEPQELARIAGKVPGLQNEQKRFQLEELRKFGAQFKLQPSSSPENSLDPFPPRILKEEPKGKEKEVDGLLTSEPMGSPVSSKTESVSDKEDKPPLAPSGGTEGPEQPPPPCPSQTGSPPVGLIKGEDKDEGPVAEQVKKSTLNPNAKEFNPTKPLLSVNKSTSTPTSPGPRTHSTPSIPVLTAGQSGLYSPQYISYIPQIHMGPAVQAPQMYPYPVSNSVPGQQGKYRGAKGSLPPQRSDQHQPASAPPMMQAAAAAGPPLVAATPYSSYIPYNPQQFPGQPAMMQPMAHYPSQPVFAPMLQSNPRMLTSGSHPQAIVSSSTPQYPSAEQPTPQALYATVHQSYPHHATQLHAHQPQPATTPTGSQPQSQHAAPSPVQHQAGQAPHLGSGQPQQNLYHPGALTGTPPSLPPGPSAQSPQSSFPQPAAVYAIHHQQLPHGFTNMAHVTQAHVQTGITAAPPPHPGAPHPPQVMLLHPPQSHGGPPQGAVPQSGVPALSASTPSPYPYIGHPQGEQPGQAPGFPGGADDRILCRVGRSHSRRRQGLAPGSVLCFPPSSLSCDPAAPLPTASPALSDPDCLLT

SEQ ID NO: 5306 - protein, 1044 aa, Homo sapiens
MLKPQPLQQPSQPQQPPPTQQAVARRPPGGTSPPNGGLPGPLATSAAPPGPPAAASPCLGPVAAAGSGLRRGAEGILAPQPPPPQQHQERPGAAAIGSARGQSTGKGPPQSPVFEGVYNNSRMLHFLTAVVGSTCDVKVKNGTTYEGIFKTLSSKFELAVDAVHRKASEPAGGPRREDIVDTMVFKPSDVMLVHFRNVDFNYATKDKFTDSAIAMNSKVNGEHKEKVLQRWEGGDSNSDDYDLESDMSNGWDPNEMFKFNEENYGVKTTYDSSLSSYTVPLEKDNSEEFRQRELRAAQLAREIESSPQYRLRIAMENDDGRTEEEKHSAVQRQGSGRESPSLASREGKYIPLPQRVREGPRGGVRCSSSRGGRPGLSSLPPRGPHHLDNSSPGPGSEARGINGGPSRMSPKAQRPLRGAKTLSSPSNRPSGETSVPPPPAVGRMYPPRSPKSAAPAPISASCPEPPIGSAVPTSSASIPVTSSVSDPGVGSISPASPKISLAPTDVKELSTKEPGRTLEPQELARIAGKVPGLQNEQKRFQLEELRKFGAQFKLQPSSSPENSLDPFPPRILKEEPKGKEKEVDGLLTSEPMGSPVSSKTESVSDKEDKPPLAPSGGTEGPEQPPPPCPSQTGSPPVGLIKGEDKDEGPVAEQVKKSTLNPNAKEFNPTKPLLSVNKSTSTPTSPGPRTHSTPSIPVLTAGQSGLYSPQYISYIPQIHMGPAVQAPQMYPYPVSNSVPGQQGKYRGAKGSLPPQRSDQHQPASAPPMMQAAAAAGPPLVAATPYSSYIPYNPQQFPGQPAMMQPMAHYPSQPVFAPMLQSNPRMLTSGSHPQAIVSSSTPQYPSAEQPTPQALYATVHQSYPHHATQLHAHQPQPATTPTGSQPQSQHAAPSPVQHQAGQAPHLGSGQPQQNLYHPGALTGTPPSLPPGPSAQSPQSSFPQPAAVYAIHHQQLPHGFTNMAHVTQAHVQTGITAAPPPHPGAPHPPQVMLLHPPQSHGGPPQGAVPQSGVPALSASTPSPYPYIGHPQVQSHPSQQLPFHPPGN

SEQ ID NO: 5307 - protein, 1044 aa, Homo sapiens
MLKPQPLQQPSQPQQPPPTQQAVARRPPGGTSPPNGGLPGPLATSAAPPGPPAAASPCLGPVAAAGSGLRRGAEGILAPQPPPPQQHQERPGAAAIGSARGQSTGKGPPQSPVFEGVYNNSRMLHFLTAVVGSTCDVKVKNGTTYEGIFKTLSSKFELAVDAVHRKASEPAGGPRREDIVDTMVFKPSDVMLVHFRNVDFNYATKDKFTDSAIAMNSKVNGEHKEKVLQRWEGGDSNSDDYDLESDMSNGWDPNEMFKFNEENYGVKTTYDSSLSSYTVPLEKDNSEEFRQRELRAAQLAREIESSPQYRLRIAMENDDGRTEEEKHSAVQRQGSGRESPSLASREGKYIPLPQRVREGPRGGVRCSSSRGGRPGLSSLPPRGPHHLDNSSPGPGSEARGINGGPSRMSPKAQRPLRGAKTLSSPSNRPSGETSVPPPPAVGRMYPPRSPKSAAPAPISASCPEPPIGSAVPTSSASIPVTSSVSDPGVGSISPASPKISLAPTDVKELSTKEPGRTLEPQELARIAGKVPGLQNEQKRFQLEELRKFGAQFKLQPSSSPENSLDPFPPRILKEEPKGKEKEVDGLLTSEPMGSPVSSKTESVSDKEDKPPLAPSGGTEGPEQPPPPCPSQTGSPPVGLIKGEDKDEGPVAEQVKKSTLNPNAKEFNPTKPLLSVNKSTSTPTSPGPRTHSTPSIPVLTAGQSGLYSPQYISYIPQIHMGPAVQAPQMYPYPVSNSVPGQQGKYRGAKGSLPPQRSDQHQPASAPPMMQAAAAAGPPLVAATPYSSYIPYNPQQFPGQPAMMQPMAHYPSQPVFAPMLQSNPRMLTSGSHPQAIVSSSTPQYPSAEQPTPQALYATVHQSYPHHATQLHAHQPQPATTPTGSQPQSQHAAPSPVQHQAGQAPHLGSGQPQQNLYHPGALTGTPPSLPPGPSAQSPQSSFPQPAAVYAIHHQQLPHGFTNMAHVTQAHVQTGITAAPPPHPGAPHPPQVMLLHPPQSHGGPPQGAVPQSGVPALSASTPSPYPYIGHPQAPLPPPGELKIVLAAT

SEQ ID NO: 5308 - protein, 284 aa, Homo sapiens
MPRYAQLVMGPAGSGKSTYCATMVQHCEALNRSVQVVNLDPAAEHFNYSVMADIRELIEVDDVMEDDSLRFGPNGGLVFCMEYFANNFDWLENCLGHVEDDYILFDCPGQIELYTHLPVMKQLVQQLEQWEFRVCGVFLVDSQFMVESFKFISGILAALSAMISLEIPQVNIMTKMDLLSKKAKKEIEKFLDPDMYSLLEDSTSDLRSKKFKKLTKAICGLIDDYSMVRFLPYDQSDEESMNIALQHIDFAIQYGEDLEFKEPKEREDESSSMFDEYFQECQDE

SEQ ID NO: 5309 - protein, 266 aa, Homo sapiens
MAAASAGATRLLLLLLMAVAAPSRARGSGCRAGTGARGAGAEGREGEACGTVGLLLEHSFEIDDSANFRKRGSLLWNQQDGTLSLSQRQLSEEERGRLRDVAALNGLYRVRIPRRPGALDGLEAGGYVSSFVPACSLVESHLSDQLTLHVDVAGNVVGVSVVTHPGGCRGHEVEDVDLELFNTSVQLQPPTTAPALRRRPSLSAWRWNRPRRPRTPRSRSPSSPNTGTSSWGGPCCSQPCVLLRQGPRHRHRRPDGCTSFPSSCSS

SEQ ID NO: 5310 - protein, 262 aa, Homo sapiens
MAAASAGATRLLLLLLMAVAAPSRARGSGCRAGTGARGAGAEGREGEACGTVGLLLEHSFEIDDSANFRKRGSLLWNQQDGTLSLSQRQLSEEERGRLRDVAALNGLYRVRIPRRPGALDGLEAGGYVSSFVPACSLVESHLSDQLTLHVDVAGNVVGVSVVTHPGGCRGHEVEDVDLELFNTSVQLQPPTTAPGPETAAFIERLEMEQAQKAKNPQEQKSFFAKYWMYIIPVVLFLMMSGAPDTGGQGGGGGGGGGGGSGR

SEQ ID NO: 5311 - protein, 206 aa, Homo sapiens
MDEDVLTTLKILIIGESGVGKSSLLLRFTDDTFDPELAATIGVDFKVKTISVDGNKAKLAIWDTAGQERFRTLTPSYYRGAQGVILVYDVTRRDTFVKLDNWLNELETYCTRNDIVNMLVGNKIDKENREVDRNEGLKFARKHSMLFIEASAKTCDGVQCAFEELVEKIIQTPGLWESENQNKGVKLSHREEGQGGGACGGYCSVL

SEQ ID NO: 5312 - protein, 1279 aa, Homo sapiens
MTLTERLREKISRAFYNHGLLCASYPIPIILFTGFCILACCYPLLKLPLPGTGPVEFTTPVKDYSPPPVDSDRKQGEPTEQPEWYVGAPVAYVQQIFVKSSVFPWHKNLLAVDVFRSPLSRAFQLVEEIRNHVLRDSSGIRSLEELCLQVTDLLPGLRKLRNLLPEHGCLLLSPGNFWQNDWERFHADPDIIGTIHQHEPKTLQTSATLKDLLFGVPGKYSGVSLYTRKRMVSYTITLVFQHYHAKFLGSLRARLMLLHPSPNCSLRAESLVHVHFKEEIGVAELIPLVTTYIILFAYIYFSTRKIDMVKSKWGLALAAVVTVLSSLLMSVGLCTLFGLTPTLNGGEIFPYLVVVIGLENVLVLTKSVVSTPVDLEVKLRIAQGLSSESWSIMKNMATELGIILIGYFTLVPAIQEFCLFAVVGLVSDFFLQMLFFTTVLSIDIRRMELADLNKRLPPEACLPSAKPVGQPTRYERQLAVRPSTPHTITLQPSSFRNLRLPKRLRVVYFLARTRLAQRLIMAGTVVWIGILVYTDPAGLRNYLAAQVTEQSPLGEGALAPMPVPSGMLPPSHPDPAFSIFPPDAPKLPENQTSPGESPERGGPAEVVHDSPVPEVTWGPEDEELWRKLSFRHWPTLFSYYNITLAKRYISLLPVIPVTLRLNPREALEGRHPQDGRSAWPPPGPIPAGHWEAGPKGPGGVQAHGDVTLYKVAALGLATGIVLVLLLLCLYRVLCPRNYGQLGGGPGRRRRGELPCDDYGYAPPETEIVPLVLRGHLMDIECLASDGMLLVSCCLAGHVCVWDAQTGDCLTRIPRPGRQRRDSGVGSGLEAQESWERLSDGGKAGPEEPGDSPPLRHRPRGPPPPSLFGDQPDLTCLIDTNFSAQPRSSQPTQPEPRHRAVCGRSRDSPGYDFSCLVQRVYQEEGLAAVCTPALRPPSPGPVLSQAPEDEGGSPEKGSPSLAWAPSAEGSIWSLELQGNLIVVGRSSGRLEVWDAIEGVLCCSSEEVSSGITALVFLDKRIVAARLNGSLDFFSLETHTALSPLQFRGTPGRGSSPASPVYSSSDTVACHLTHTVPCAHQKPITALKAAAGRLVTGSQDHTLRVFRLEDSCCLFTLQGHSGAITTVYIDQTMVLASGGQDGAICLWDVLTGSRVSHVFAHRGDVTSLTCTTSCVISSGLDDLISIWDRSTGIKFYSIQQDLGCGASLGVISDNLLVTGGQGCVSFWDLNYGDLLQTVYLGKNSEAQPARQILVLDNAAIVCNFGSELSLVYVPSVLEKLD

SEQ ID NO: 5313 - protein, 666 aa, Homo sapiens
MIHELLLALSGYPGSIFTWNKRSGLQVSQDFPFLHPSETSVLNRLCRLGTDYIRFTEFIEQYTGHVQQQDHHPSQQGQGGLHGIYLRAFCTGLDSVLQPYRQALLDLEQEFLGDPHLSISHVNYFLDQFQLLFPSVMVVVEQIKSQKIHGCQILETVYKHSCGGLPPVRSALEKILAVCHGVMYKQLSAWMLHGLLLDQHEEFFIKQGPSSGNVSAQPEEDEEDLGIGGLTGKQLRELQDLRLIEEENMLAPSLKQFSLRVEILPSYIPVRVAEKILFVGESVQMFENQNVNLTRKGSILKNQEDTFAAELHRLKQQPLFSLVDFEQVVDRIRSTVAEHLWKLMVEESDLLGQLKIIKDFYLLGRGELFQAFIDTAQHMLKTPPTAVTEHDVNVAFQQSAHKVLLDDDNLLPLLHLTIEYHGKEHKDATQAREGPSRETSPREAPASGWAALGLSYKVQWPLHILFTPAVLEKYNVVFKYLLSVRRVQAELQHCWALQMQRKHLKSNQTDAIKWRLRNHMAFLVDNLQYYLQVDVLESQFSQLLHQINSTRDFESIRLAHDHFLSNLLAQSFILLKPVFHCLNEILDLCHSFCSLVSQNLGPLDERGAAQLSILVKGFSRQSSLLFKILSSVRNHQINSDLAQLLLRLDYNKYYTQAGGTLGSFGM

SEQ ID NO: 5314 - protein, 877 aa, Homo sapiens
MCDLRRPAAGGMMDLAYVCEWEKWSKSTHCPSVPLACAWSCRNLIAFTMDLRSDDQDLTRMIHILDTEHPWDLHSIPSEHHEAITCLEWDQSGSRLLSADADGQIKCWSMADHLANSWESSVGSLVEGDPIVALSWLHNGVKLALHVEKSGASSFGEKFSRVKFSPSLTLFGGKPMEGWIAVTVSGLVTVSLLKPSGQVLTSTESLCRLRGRVALADIAFTGGGNIVVATADGSSASPVQFYKVCVSVVSEKCRIDTEILPSLFMRCTTDLNRKDKFPAITHLKFLARDMSEQVLLCASSQTSSIVECWSLRKEGLPVNNIFQQISPVVGDKQPTILKWRILSATNDLDRVSAVALPKLPISLTNTDLKVASDTQFYPGLGLALAFHDGSVHIVHRLSLQTMAVFYSSAAPRPVDEPAMKRPRTAGPAVHLKAMQLSWTSLALVGIDSHGKLSVLRLSPSMGHPLEVGLALRHLLFLLEYCMVTGYDWWDILLHVQPSMVQSLVEKLHEEYTRQTAALQQVLSTRILAMKASLCKLSPCTVTRVCDYHTKLFLIAISSTLKSLLRPHFLNTPDKSPGDRLTEICTKITDVDIDKVMINLKTEEFVLDMNTLQALQQLLQWVGDFVLYLLASLPNQGSLLRPGHSFLRDGTSLGMLRELMVVIRIWGLLKPSCLPVYTATSDTQDSMSLLFRLLTKLWICCRDEGPASEPDEALVDECCLLPSQLLIPSLDWLPASDGLVSRLQPKQPLRLQFGRAPTLPGSAATLQLDGLARAPGQPKIDHLRRLHLGACPTEECKACTRCGCVTMLKSPNRTTAVKQWEQRWIKNCLAVEGRGPDACVTSRASEEAPAFVQLGPQSTHHSPRTPRSLDHLHPEDRP

SEQ ID NO: 5315 - protein, 1558 aa, Homo sapiens
MGLCGLLERCWLHHDPDGVLTLNAENTNYAYQVPNFHKCEICLLSFPKESQFQRHMRDHERNDKPHRCDQCPQTFNVEFNLTLHKCTHSGEDPTCPVCNKKFSRVASLKAHIMLHEKEENLICSECGDEFTLQSQLAVHMEEHRQELAGTRQHACKACKKEFETSSELKEHMKTHYKIRVSSTRSYNRNIDRSGFTYSCPHCGKTFQKPSQLTRHIRIHTGERPFKCSECGKAFNQKGALQTHMIKHTGEKPHACAFCPAAFSQKGNLQSHVQRVHSEVKNGPTYNCTECSCVFKSLGSLNTHISKMHMGGPQNSTSSTETAHVLTATLFQTLPLQQTEAQATSASSQPSSQAVSDVIQQLLELSEPAPVESGQSPQPGQQLSITVGINQDILQQALENSGLSSIPAAAHPNDSCHAKTSAPHAQNPDVSSVSNEQTDPTDAEQEKEQESPEKLDKKEKKMIKKKSPFLPGSIREENGVRWHVCPYCAKEFRKPSDLVRHIRIHTHEKPFKCPQCFRAFAVKSTLTAHIKTHTGIKAFKCQYCMKSFSTSGSLKVHIRLHTGVRPFACPHCDKKFRTSGHRKTHIASHFKHTELRKMRHQRKPAKVRVGKTNVPVPDIPLQEPILITDLGLIQPIPKNQFFQSYFNNNFVNEADRPYKCFYCHRAYKKSCHLKQHIRSHTGEKPFKCSQCGRGFVSAGVLKAHIRTHTGLKSFKCLICNGAFTTGGSLRRHMGIHNDLRPYMCPYCQKTFKTSLNCKKHMKTHRYELAQQLQQHQQAASIDDSTVDQQSMQASTQMQVEIESDELPQTAEVVAANPEAMLDLEPQHVVGTEEAGLGQQLADQPLEADEDGFVAPQDPLRGHVDQFEEQSPAQQSFEPAGLPQGFTVTDTYHQQPQFPPVQQLQDSSTLESQALSTSFHQQSLLQAPSSDGMNVTTRLIQESSQEELDLQAQGSQFLEDNEDQSRRSYRCDYCNKGFKKSSHLKQHVRSHTGEKPYKCKLCGRGFVSSGVLKSHEKTHTGVKAFSCSVCNASFTTNGSLTRHMATHMSMKPYKCPFCEEGFRTTVHCKKHMKRHQTVPSAVSATGETEGGDICMEEEEEHSDRNASRKSRPEVITFTEEETAQLAKIRPQESATVSEKVLVQSAAEKDRISELRDKQAELQDEPKHANCCTYCPKSFKKPSDLVRHVRIHTGEKPYKCDECGKSFTVKSTLDCHVKTHTGQKLFSCHVCSNAFSTKGSLKVHMRLHTGAKPFKCPHCELRFRTSGRRKTHMQFHYKPDPKKARKPMTRSSSEGLQPVNLLNSSSTDPNVFIMNNSVLTGQFDQNLLQPGLVGQAILPASVSAGGDLTVSLTDGSLATLEGIQLQLAANLVGPNVQISGIDAASINNITLQIDPSILQQTLQQGNLLAQQLTGEPGLAPQNSSLQTSDSTVPASVVIQPISGLSLQPTVTSANLTIGPLSEQDSVLTTNSSGTQDLTQVMTSQGLVSPSGGPHEITLTINNSSLSQVLAQAAGPTATSSSGSPQEITLTISGSRSVQHSVGPQECGSVEALYLENSSDKT

SEQ ID NO: 5316 - protein, 808 aa, Homo sapiens
MAETAAGVGRFKTNYAVERKIEPFYKGGKAQLDQTGQHLFCVCGTRVNILEVASGAVLRSLEQEDQEDITAFDLSPDNEVLVTASRALLLAQWAWQEGSVTRLWKAIHTAPVATMAFDPTSTLLATGGCDGAVRVWDIVRHYGTHHFRGSPGVVHLVAFHPDPTRLLLFSSATDAAIRVWSLQDRSCLAVLTAHYSAVTSLAFSADGHTMLSSGRDKICIIWDLQSCQATRTVPVFESVEAAVLLPEEPVSQLGVKSPGLYFLTAGDQGTLRVWEAASGQCVYTQAQPPGPGQELTHCTLAHTAGVVLTATADHNLLLYEARSLRLQKQFAGYSEEVLDVRFLGPEDSHVVVASNSPCLKVFELQTSACQILHGHTDIVLALDVFRKGWLFASCAKDQSVRIWRMNKAGQVMCVAQGSGHTHSVGTVCCSRLKESFLVTGSQDCTVKLWPLPKALLSKNTAPDNGPILLQAQTTQRCHDKDINSVAIAPNDKLLATGSQDRTAKLWALPQCQLLGVFSGHRRGLWCVQFSPMDQVLATASADGTIKLWALQDFSCLKTFEGHDASVLKVAFVSRGTQLLSSGSDGLVKLWTIKNNECVRTLDAHEDKVWGLHCSRLDDHALTGASDSRVILWKDVTEAEQAEEQARQEEQVVRQQELDNLLHEKRYLRALGLAISLDRPHTVLTVIQAIRRDPEACEKLEATMLRLRRDQKEALLRFCVTWNTNSRHCHEAQAVLGVLLRREAPEELLAYEGVRAALEALLPYTERHFQRLSRTLQAAAFLDFLWHNMKLPVPAAAPTPWETHKGALP

SEQ ID NO: 5317 - protein, 536 aa, Homo sapiens
MMFQDSVAFEDVAVSFTQEEWALLDPSQKNLYRDVMQETFKNLTSVGKTWKVQNIEDEYKNPRRNLSLMREKLCESKESHHCGESFNQIADDMLNRKTLPGITPCESSVCGEVGTGHSSLNTHIRADTGHKSSEYQEYGENPYRNKECKKAFSYLDSFQSHDKACTKEKLYDGKECTETFISHSCIQRHRVMHSGDGPYKCKFCGKAFYFLNLCLIHERIHTGVKPYKCKQCGKAFTRSTTLPVHERTHTGVNADECKECGNAFSFPSEIRRHKRSHTGEKPYECKQCGKVFISFSSIQYHKMTHTGEKPYECKQCGKAFRCGSHLQKHGRTHTGEKPYECRQCGKAFRCTSDLQRHEKTHTEDKPYGCKQCGKGFRCASQLQIHERTHSGEKPHECKECGKVFKYFSSLRIHERTHTGEKPRECKQCGKAFRYFSSLHIHERTHTGDKPYECKVCGKAFTCSSSIRYHERTHTGEKPYECKHCGKAFISNYIRYHERTHTGEKPYQCKQCGKAFILPVHVENMKELIPLIDEKSF

SEQ ID NO: 5318 - protein, 453 aa, Homo sapiens
MALVRALVCCLLTAWHCRSGLGLPVAPAGGRNPPPAIGQFWHVTDLHLDPTYHITDDHTKVCASSKGANASNPGPFGDVLCDSPYQLILSAFDFIKNSGQEASFMIWTGDSPPHVPVPELSTDTVINVITNMTTTIQSLFPNLQVFPALGNHDYWPQDQLPVVTSKVYNAVANLWKPWLDEEAISTLRKGGFYSQKVTTNPNLRIISLNTNLYYGPNIMTLNKTDPANQFEWLESTLNNSQQNKEKVYIIAHVPVGYLPSSQNITAMREYYNEKLIDIFQKYSDVIAGQFYGHTHRDSIMVLSDKKGSPVNSLFVAPAVTPVKSVLEKQTNNPGIRLFQYDPRDYKLLDMLQYYLNLTEANLKGESIWKLEYILTQTYDIEDLQPESLYGLAKQFTILDSKQFIKYYNYFFVSYDSSVTCDKTCKAFQICAIMNLDNISYADCLKQLYIKHNY

SEQ ID NO: 5319 - protein, 338 aa, Homo sapiens
MTTTLVSATIFDLSEVLCKGNKMLNYSAPSAGGCLLDRKAVGTPAGGGFPRRHSVTLPSSKFHQNQLLSSLKGEPAPALSSRDSRFRDRSFSEGGERLLPTQKQPGGGQVNSSRYKTELCRPFEENGACKYGDKCQFAHGIHELRSLTRHPKYKTELCRTFHTIGFCPYGPRCHFIHNAEERRALAGARDLSADRPRLQHSFSFAGFPSAAATAAATGLLDSPTSITPPPILSADDLLGSPTLPDGTNNPFAFSSQELASLFAPSMGLPGGGSPTTFLFRPMSESPHMFDSPPSPQDSLSDQEGYLSSSSSSHSGSDSPTLDNSRRLPIFSRLSISDD

SEQ ID NO: 5320 - protein, 234 aa, Homo sapiens
MAERGYSFSLTTFSPSGKLVQIEYALAAVAGGAPSVGIKAANGVVLATEKKQKSILYDERSVHKVEPITKHIGLVYSGMGPDYRVLVHRARKLAQQYYLVYQEPIPTAQLVQRVASVMQEYTQSGGVRPFGVSLLICGWNEGRPYLFQSDPSGAYFAWKATAMGKNYVNGKTFLEKRYNEDLELEDAIHTAILTLKESFEGQMTEDNIEVGICNEAGFRRLTPTEVKDYLAAIA

SEQ ID NO: 5321 - protein, 235 aa, Homo sapiens
METTLLFFSQINMCESKEKTFFKLIHGSGKEETSKEAKIRAKEKRNRLSLLVQKPEFHEDTRSSRSGHLAKETRVSPEEAVKWGESFDKLLSHRDGLEAFTRFLKTEFSEENIEFWIACEDFKKSKGPQQIHLKAKAIYEKFIQTDAPKEVNLDFHTKEVITNSITQPTLHSFDAAQSRVYQLMEQDSYTRFLKSDIYLDLMEGRPQRPTNLRRRSRSFTCNEFQDVQSDVAIWL

SEQ ID NO: 5322 - protein, 599 aa, Homo sapiens
MADKLTRIAIVNHDKCKPKKCRQECKKSCPVVRMGKLCIEVTPQSKIAWISETLCIGCGICIKKCPFGALSIVNLPSNLEKETTHRYCANAFKLHRLPIPRPGEVLGLVGTNGIGKSAALKILAGKQKPNLGKYDDPPDWQEILTYFRGSELQNYFTKILEDDLKAIIKPQYVARFLRLAKGTVGSILDRKDETKTQAIVCQQLDLTHLKERNVEDLSGGELQRFACAVVCIQKADIFMFDEPSSYLDVKQRLKAAITIRSLINPDRYIIVVEHDLSVLDYLSDFICCLYGVPSAYGVVTMPFSVREGINIFLDGYVPTENLRFRDASLVFKVAETANEEEVKKMCMYKYPGMKKKMGEFELAIVAGEFTDSEIMVMLGENGTGKTTFIRMLAGRLKPDEGGEVPVLNVSYKPQKISPKSTGSVRQLLHEKIRDAYTHPQFVTDVMKPLQIENIIDQEVQTLSGGELQRVRLRLCLGKPADVYLIDEPSAYLDSEQRLMAARVVKRFILHAKKTAFVVEHDFIMATYLADRVIVFDGVPSKNTVANSPQTLLAGMNKFLSQLEITFRRDPNNYRPRINKLNSIKDVEQKKSGNYFFLDD

SEQ ID NO: 5323 - protein, 342 aa, Homo sapiens
MSKGTSSDTSLGRVSRAAFPSPTAAEMAEISRIQYEMEYTEGISQRMRVPEKLKVAPPNADLEQGFQEGVPNASVIMQVPERIVVAGNNEDVSFSRPADLDLIQSTPFKPLALKTPPRVLTLSERPLDFLDLERPPTTPQNEEIRAVGRLKRERSMSENAVRQNGQLVRNDSLWHRSDSAPRNKISRFQAPISAPEYTVTPSPQQARVCPPHMLPEDGANLSSARGILSLIQSSTRRAYQQILDVLDENRRPVLRGGSAAATSNPHHDNVRYGISNIDTTIEGTSDDLTVVDAASLRRQIIKLNRRLQLLEEENKERAKREMVMYSITVAFWLLNSWLWFRR

SEQ ID NO: 5324 - protein, 376 aa, Homo sapiens
MMMMALSKTFGQKPVKFQLEDDGEFYMIGSEVGNYLRMFRGSLYKRYPSLWRRLATVEERKKIVASSHDHGYTTLATSVTLLKASEVEEILDGNDEKYKAVSISTEPPTYLREQKAKRNSQWVPTLPNSSHHLDAVPCSTTINRNRMGRDKKRTFPLCFDDHDPAVIHENASQPEVLVPIRLDMEIDGQKLRDAFTWNMNEKLMTPEMFSEILCDDLDLNPLTFVPAIASAIRQQIESYPTDSILEDQSDQRVIIKLNIHVGNISLVDQFEWDMSEKENSPEKFALKLCSELGLGGEFVTTIAYSIRGQLSWHQKTYAFSENPLPTVEIAIRNTGDADQWCPLLETLTDAEMEKKIRDQDRNTRRMRRLANTAPAW

SEQ ID NO: 5325 - protein, 385 aa, Homo sapiens
MMMMALSKTFGQKPVKFQLEDDGEFYMIGSEVGNYLRMFRGSLYKRYPSLWRRLATVEERKKIVASSHGKKTKPNTKDHGYTTLATSVTLLKASEVEEILDGNDEKYKAVSISTEPPTYLREQKAKRNSQWVPTLPNSSHHLDAVPCSTTINRNRMGRDKKRTFPLCFDDHDPAVIHENASQPEVLVPIRLDMEIDGQKLRDAFTWNMNEKLMTPEMFSEILCDDLDLNPLTFVPAIASAIRQQIESYPTDSILEDQSDQRVIIKLNIHVGNISLVDQFEWDMSEKENSPEKFALKLCSELGLGGEFVTTIAYSIRGQLSWHQKTYAFSENPLPTVEIAIRNTGDADQWCPLLETLTDAEMEKKIRDQDRNTRRMRRLANTAPAW

SEQ ID NO: 5326 - protein, 546 aa, Homo sapiens
MTPLVSRLSRLWAIMRKPRAAVGSGHRKQAASQEGRQKHAKNNSQAKPSACDGMIAECPGAPAGLARQPEEVVLQASVSSYHLFRDVAEVTAFRGSLLSWYDQEKRDLPWRRRAEDEMDLDRRAYAVWVSEVMLQQTQVATVINYYTGWMQKWPTLQDLASASLEEVNQLWAGLGYYSRGRRLQEGARKVVEELGGHMPRTAETLQQLLPGVGRYTAGAIASIAFGQATGVVDGNVARVLCRVRAIGADPSSTLVSQQLWGLAQQLVDPARPGDFNQAAMELGATVCTPQRPLCSQCPVESLCRARQRVEQEQLLASGSLSGSPDVEECAPNTGQCHLCLPPSEPWDQTLGVVNFPRKASRKPPREESSATCVLEQPGALGAQILLVQRPNSGLLAGLWEFPSVTWEPSEQLQRKALLQELQRWAGPLPATHLRHLGEVVHTFSHIKLTYQVYGLALEGQTPVTTVPPGARWLTQEEFHTAAVSTAMKKVFRVYQGQQPGTCMGSKRSQVSSPCSRKKPRMGQQVLDNFFRSHISTDAHSLNSAAQ

SEQ ID NO: 5327 - protein, 304 aa, Homo sapiens
MFSVLSYGRLVARAVLGGLSQTDPRAGGGGGGDYGLVTAGCGFGKDFRKGLLKKGACYGDDACFVARHRSADVLGVADGVGGWRDYGVDPSQFSGTLMRTCERLVKEGRFVPSNPIGILTTSYCELLQNKVPLLGSSTACIVVLDRTSHRLHTANLGDSGFLVVRGGEVVHRSDEQQHYFNTPFQLSIAPPEAEGVVLSDSPDAADSTSFDVQLGDIILTATDGLFDNMPDYMILQELKKLKNSNYESIQQTARSIAEQAHELAYDPNYMSPFAQFACDNGLNVRGGKPDDITVLLSIVAEYTD

SEQ ID NO: 5328 - protein, 316 aa, Homo sapiens
MSALLRLLRTGAPAAACLRLGTSAGTGSRRAMALYHTEERGQPCSQNYRLFFKNVTGHYISPFHDIPLKVNSKEENGIPMKKARNDEYEIATKEPMNPIKQYVKDGKLRYVANIFPYKGYIWNYGTLPQTWEDPHEKDKSTNCFGDNDPIDVCEIGSKILSCGEVIHVKILGILALIDEGETDWKLIAINANDPEASKFHDIDDVKKFKPGYLEATLNWFRLYKVPDGKPENQFAFNGEFKNKAFALEVIKSTHQCWKALLMKKCNGGAINCTNVQISDSPFRCTQEEARSLVESVSSSPNKESNEEEQVWHFLGK

SEQ ID NO: 5329 - protein, 63 aa, Homo sapiens
MSALLRLLRTGAPAAACLRLGTSAGTGSRRAMALYHTEERGQPCSQNYRLFFRKWHSYEESTK

SEQ ID NO: 5330 - protein, 55 aa, Homo sapiens
MSALLRLLRTGAPAAACLRLGTSAGTGSRRAMALYHTEERGQPCSQNYRLFFKSV

SEQ ID NO: 5331 - protein, 305 aa, Homo sapiens
MSALLRLLRTGAPAAACLRLGTSAGTGSRRAMALYHTEERGQPCSQNYRLFFKNVTGHYISPFHDIPLKVNSKEENGIPMKKARNDEYENLFNMIVEIPRWTNAKMEIATKEPMNPIKQYVKDGKLRYVANIFPYKGYIWNYGTLPQILSCGEVIHVKILGILALIDEGETDWKLIAINANDPEASKFHDIDDVKKFKPGYLEATLNWFRLYKVPDGKPENQFAFNGEFKNKAFALEVIKSTHQCWKALLMKKCNGGAINCTNVQISDSPFRCTQEEARSLVESVSSSPNKESNEEEQVWHFLGK

SEQ ID NO: 5332 - protein, 232 aa, Homo sapiens
MSALLRLLRTGAPAAACLRLGTSAGTGSRRAMALYHTEERGQPCSQNYRLFFKNVTGHYISPFHDIPLKVNSKEILSCGEVIHVKILGILALIDEGETDWKLIAINANDPEASKFHDIDDVKKFKPGYLEATLNWFRLYKVPDGKPENQFAFNGEFKNKAFALEVIKSTHQCWKALLMKKCNGGAINCTNVQISDSPFRCTQEEARSLVESVSSSPNKESNEEEQVWHFLGK

SEQ ID NO: 5333 - protein, 168 aa, Homo sapiens
MSALLRLLRTGAPAAACLRLGTSAGTGSRRAMALYHTEERGQPCSQNYRLFFNIDDVKKFKPGYLEATLNWFRLYKVPDGKPENQFAFNGEFKNKAFALEVIKSTHQCWKALLMKKCNGGAINCTNVQISDSPFRCTQEEARSLVESVSSSPNKESNEEEQVWHFLGK

SEQ ID NO: 5334 - protein, 334 aa, Homo sapiens
MSALLRLLRTGAPAAACLRLGTSAGTGSRRAMALYHTEERGQPCSQNYRLFFKNVTGHYISPFHDIPLKVNSKEENGIPMKKARNDEYENLFNMIVEIPRWTNAKMEIATKEPMNPIKQYVKDGKLRYVANIFPYKGYIWNYGTLPQTWEDPHEKDKSTNCFGDNDPIDVCEIGSKILSCGEVIHVKILGILALIDEGETDWKLIAINANDPEASKFHDIDDVKKFKPGYLEATLNWFRLYKVPDGKPENQFAFNGEFKNKAFALEVIKSTHQCWKALLMKKCNGGAINCTNVQISDSPFRCTQEEARSLVESVSSSPNKESNEEEQVWHFLGK

SEQ ID NO: 5335 - protein, 259 aa, Homo sapiens
MARIPKTLKFVVVIVAVLLPVLAYSATTARQEEVPQQTVAPQQQRHSFKGEECPAGSHRSEHTGACNPCTEGVDYTNASNNEPSCFPCTVCKSDQKHKSSCTMTRDTVCQCKEGTFRNENSPEMCRKCSRCPSGEVQVSNCTSWDDIQCVEEFGANATVETPAAEETMNTSPGTPAPAAEETMNTSPGTPAPAAEETMTTSPGTPAPAAEETMTTSPGTPAPAAEETMTTSPGTPASSHYLSCTIVGIIVLIVLLIVFV

SEQ ID NO: 5336 - protein, 387 aa, Homo sapiens
MVHCSCVLFRKYGNFIDKLRLFTRGGSGGMGYPRLGGEGGKGGDVWVVAQNRMTLKQLKDRYPRKRFVAGVGANSKISALKGSKGKDWEIPVPVGISVTDENGKIIGELNKENDRILVAQGGLGGKLLTNFLPLKGQKRIIHLDLKLIADVGLVGFPNAGKSSLLSCVSHAKPAIADYAFTTLKPELGKIMYSDFKQISVADLPGLIEGAHMNKGMGHKFLKHIERTRQLLFVVDISGFQLSSHTQYRTAFETIILLTKELELYKEELQTKPALLAVNKMDLPDAQDKFHELMSQLQNPKDFLHLFEKNMIPERTVEFQHIIPISAVTGEGIEELKNCIRKSLDEQANQENDALHKKQLLNLWISDTMSSTEPPSKHAVTTSKMDII

SEQ ID NO: 5337 - protein, 689 aa, Homo sapiens [sequence omitted]

SEQ ID NO: 5338 - protein, 237 aa, Homo sapiens
MAMFRSLVASAQQRQPPAGPAGGDSGLEAQYTCPICLEVYHRPVAIGSCGHTFCGECLQPCLQVPSPLCPLCRLPFDPKKVDKATHVEKQLSSYKAPCRGCNKKVTLAKMRVHISSCLKVQEQMANCPKFVPVVPTSQPIPSNIPNRSTFACPYCGARNLDQQELVKHCVESHRSDPNRVVCPICSAMPWGDPSYKSANFLQHLLHRHKFSYDTFVDYSIDEEAAFQAALALSLSEN

SEQ ID NO: 5339 - protein, 318 aa, Homo sapiens
MVELMFPLLLLLLPFLLYMAAPQIRKMLSSGVCTSTVQLPGKVVVVTGANTGIGKETAKELAQRGARVYLACRDVEKGELVAKEIQTTTGNQQVLVRKLDLSDTKSIRAFAKGFLAEEKHLHVLINNAGVMMCPYSKTADGFEMHIGVNHLGHFLLTHLLLEKLKESAPSRIVNVSSLAHHLGRIHFHNLQGEKFYNAGLAYCHSKLANILFTQELARRLKGSGVTTYSVHPGTVQSELVRHSSFMRWMWWLFSFFIKTPQQGAQTSLHCALTEGLEILSGNHFSDCHVAWVSVQARNETIARRLWDVSCDLLGLPID

SEQ ID NO: 5340 - protein, 578 aa, Homo sapiens
MAFMEKPPAGKVLLDDTVPLTAAIEASQSLQSHTEYIIRVQRGISVENSWQIVRRYSDFDLLNNSLQIAGLSLPLPPKKLIGNMDREFIAERQKGLQNYLNVITTNHILSNCELVKKFLDPNNYSANYTEIALQQVSMFFRSEPKWEVVEPLKDIGWRIRKKYFLMKIKNQPKERLVLSWADLGPDKYLSDKDFQCLIKLLPSCLHPYIYRVTFATANESSALLIRMFNEKGTLKDLIYKAKPKDPFLKKYCNPKKIQGLELQQIKTYGRQILEVLKFLHDKGFPYGHLHASNVMLDGDTCRLLDLENSLLGLPSFYRSYFSQFRKINTLESVDVHCFGHLLYEMTYGRPPDSVPVDSFPPAPSMAVVAVLESTLSCEACKNGMPTISRLLQMPLFSDVLLTTSEKPQFKIPTKLKEALRIAKECIEKRLIEEQKQIHQHRRLTRAQSHHGSEEERKKRKILARKKSKRSALENSEEHSAKYSNSNNSAGSGASSPLTSPSSPTPPSTSGISALPPPPPPPPPPAAPLPPASTEAPAQLSSQAVNGMSRGALLSSIQNFQKGTLRKAKTCDHSAPKIG

SEQ ID NO: 5341 - protein, 336 aa, Homo sapiens
MEKLRLLGLRYQEYVTRHPAATAQLETAVRGFSYLLAGRFADSHELSELVYSASNLLVLLNDGILRKELRKKLPVSLSQQKLLTWLSVLECVEVFMEMGAAKVWGEVGRWLVIALIQLAKAVLRMLLLLWFKAGLQTSPPIVPLDRETQAQPPDGDHSPGNHEQSYVGKRSNRVVRTLQNTPSLHSRHWGAPQQREGRQQQHHEELSATPTPLGLQETIAEFLYIARPLLHLLSLGLWGQRSWKPWLLAGVVDVTSLSLLSDRKGLTRRERRELRRRTILLLYYLLRSPFYDRFSEARILFLLQLLADHVPGVGLVTRPLMDYLPTWQKIYFYSWG

SEQ ID NO: 5342 - protein, 346 aa, Homo sapiens
MEKLRLLGLRYQEYVTRHPAATAQLETAVRGFSYLLAGRFADSHELSELVYSASNLLVLLNDGILRKELRKKLPVSLSQQKLLTWLSVLECVEVFMEMGAAKVWGEVGRWLVIALIQLAKAVLRMLLLLWFKAGLQTSPPIVPLDRETQAQPPDGDHSPGNHEQSYVGKRSNRVVRTLQNTPSLHSRHWGAPQQREGRQQQHHEELSATPTPLGLQETIAEFLYIARPLLHLLSLGLWGQRSWKPWLLAGVVDVTSLSLLSDRKGLTRRERRELRRRTILLLYYLLRSPFYDRFSEARILFLLQLLADHVPGVGLVTTSQRAASPCLPARPHTQPWSPPAFLPGHP

SEQ ID NO: 5343 - protein, 838 aa, Homo sapiens
MQEQEIGFISKYNEGLCVNTDPVSILTSILDMSLHRQMGSDRDLQSSASSVSLPSVKKAPKKRRISIGSLFRRKKDNKRKSRELNGGVDGIASIESIHSEMCTDKNSIFSTNTSSDNGLTSISKQIGDFIECPLCLLRHSKDRFPDIMTCHHRSCVDCLRQYLRIEISESRVNISCPECTERFNPHDIRLILSDDVLMEKYEEFMLRRWLVADPDCRWCPAPDCGYAVIAFGCASCPKLTCGREGCGTEFCYHCKQIWHPNQTCDAARQERAQSLRLRTIRSSSISYSQESGAAADDIKPCPRCAAYIIKMNDGSCNHMTCAVCGCEFCWLCMKEISDLHYLSPSGCTFWGKKPWSRKKKILWQLGTLVGAPVGIALIAGIAIPAMIIGIPVYVGRKIHNRYEGKDVSKHKRNLAIAGGVTLSVIVSPVVAAVTVGIGVPIMLAYVYGVVPISLCRSGGCGVSAGNGKGVRIEFDDENDINVGGTNTAVDTTSVAEARHNPSIGEGSVGGLTGSLSASGSHMDRIGAIRDNLSETASTMALAGASITGSLSGSAMVNCFNRLEVQADVQKERYSLSGESGTVSLGTVSDNASTKAMAGSILNSYIPLDKEGNSMEVQVDIESKPSKFRHNSGSSSVDDGSATRSHAGGSSSGLPEGKSSATKWSKEATAGKKSKSGKLRKKGNMKINETREDMDAQLLEQQSTNSSEFEAPSLSDSMPSVADSHSSHFSEFSCSDLESMKTSCSHGSSDYHTRFATVNILPEVENDRLENSPHQCSISVVTQTASCSEVSQLNHIAEEHGNNGIKPNVDLYFGDALKETNNNHSHQTMELKVAIQTEI

SEQ ID NO: 5344 - protein, 838 aa, Homo sapiens; identical to SEQ ID NO: 5343

SEQ ID NO: 5345 - protein, 740 aa, Homo sapiens
MATANSIIVLDDDDEDEAAAQPGPSHPLPNAASPGAEAPSSSEPHGARGSSSSGGKKCYKLENEKLFEEFLELCKMQTADHPEVVPFLYNRQQRAHSLFLASAEFCNILSRVLSRARSRPAKLYVYINELCTVLKAHSAKKKLNLAPAATTSNEPSGNNPPTHLSLDPTNAENTASQSPRTRGSRRQIQRLEQLLALYVAEIRRLQEKELDLSELDDPDSAYLQEARLKRKLIRLFGRLCELKDCSSLTGRVIEQRIPYRGTRYPEVNRRIERLINKPGPDTFPDYGDVLRAVEKAAARHSLGLPRQQLQLMAQDAFRDVGIRLQERRHLDLIYNFGCHLTDDYRPGVDPALSDPVLARRLRENRSLAMSRLDEVISKYAMLQDKSEEGERKKRRARLQGTSSHSADTPEASLDSGEGPSGMASQGCPSASRAETDDEDDEESDEEEEEEEEEEEEEATDSEEEEDLEQMQEGQEDDEEEDEEEEAAAGKDGDKSPMSSLQISNEKNLEPGKQISRSSGEQQNKGRIVSPSLLSEEPLAPSSIDAESNGEQPEELTLEEESPVSQLFELEIEALPLDTPSSVETDISSSRKQSEEPFTTVLENGAGMVSSTSFNGGVSPHNWGDSGPPCKKSRKEKKQTGSGPLGNSYVERQRSVHEKNGKKICTLPSPPSPLASLAPVADSSTRVDSPSHGLVTSSLCIPSPARLSQTPHSQPPRPGTCKTSVATQCDPEEIIVLSDSD

SEQ ID NO: 5346 - protein, 856 aa, Homo sapiens
MANETQKVGAIHFPFPFTPYSIQEDFMAELYRVLEAGKSGIFESPTGTGKSLSLICGALSWLRDFEQKKREEEARLLETGTGPLHDEKDESLCLSSSCEGAAGTPRPAGEPAWVTQFVQKKEERDLVDRLKAEQARRKQREERLQQLQHRVQLKYAAKRLRQEEEERENLLRLSREMLETGPEAERLEQLESGEEELVLAEYESDEEKKVASRVDEDEDDLEEEHITKIYYCSRTHSQLAQFVHEVKKSPFGKDVRLVSLGSRQNLCVNEDVKSLGSVQLINDRCVDMQRSRHEKKKGAEEEKPKRRRQEKQAACPFYNHEQMGLLRDEALAEVKDMEQLLALGKEARACPYYGSRLAIPAAQLVVLPYQMLLHAATRQAAGIRLQDQVVIIDEAHNLIDTITGMHSVEVSGSQLCQAHSQLLQYVERYGKRLKAKNLMYLKQILYLLEKFVAVLGGNIKQNPNTQSLSQTGTELKTINDFLFQSQIDNINLFKVQRYCEKSMISRKLFGFTERYGAVFSSREQPKLAGFQQFLQSLQPRTTEALAAPADESQASTLRPASPLMHIQGFLAALTTANQDGRVILSRQGSLSQSTLKFLLLNPAVHFAQVVKECRAVVIAGGTMQPVSDFRQQLLACAGVEAERGGGVFCGHVIPPDNILPLVICSGISNQPLEFTFQKRELPQMIFQEPKSAHQVEQVLLAYSRCIQACGQERGQVTGALLLSVVGGKMSEGINFSDNLGRCVVMVGMPFPNIRSAELQEKMAYLDQTLPRAPGQAPPGKALVENLCMKAVNQSIGRAIRHQKDFASVVLLDQRYARPPVLAKLPAWIRARVEVKATFGPAIAAVQKFHREKSASS

SEQ ID NO: 5347 - protein, 906 aa, Homo sapiens
MANETQKVGAIHFPFPFTPYSIQEDFMAELYRVLEAGKIGIFESPTGTGKSLSLICGALSWLRDFEQKKREEEARLLETGTGPLHDEKDESLCLSSSCEGAAGTPRPAGEPAWVTQFVQKKEERDLVDRLKAEQARRKQREERLQQLQHRVQLKYAAKRLRQEEEERENLLRLSREMLETGPEAERLEQLESGEEELVLAEYESDEEKKVASRVDEDEDDLEEEHITKIYYCSRTHSQLAQFVHEVKKSPFGKDVRLVSLGSRQNLCVNEDVKSLGSVQLINDRCVDMQRSRHEKKKGAEEEKPKRRRQEKQAACPFYNHEQMGLLRDEALAEVKDMEQLLALGKEARACPYYGSRLAIPAAQLVVLPYQMLLHAATRQAAGIRLQDQVVIIDEAHNLIDTITGMHSVEVSGSQLCQAHSQLLQYVERYGKRLKAKNLMYLKQILYLLEKFVAVLGGNIKQNPNTQSLSQTGTELKTINDFLFQSQIDNINLFKVQRYCEKSMISRKLFGFTERYGAVFSSREQPKLAGFQQFLQSLQPRTTEALAAPADESQASTLRPASPLMHIEGFLAALTTANQDGRVILSRQGSLSQSTLKFLLLNPAVHFAQVVKECRAVVIAGGTMQPVSDFRQQLLACAGVEAERVVEFSCGHVIPPDNILPLVICSGISNQPLEFTFQKRELPQMMDEVGRILCNLCGVVPGGVVCFFPSYEYLRQVHAHWEKGGLLGRLAARKKIFQEPKSAHQVEQVLLAYSRCIQACGQERGQVTGALLLSVVGGKMSEGINFSDNLGRCVVMVGMPFPNIRSAELQEKMAYLDQTLPRAPGQAPPGKALVENLCMKAVNQSIGRAIRHQKDFASIVLLDQRYARPPVLAKLPAWIRARVEVKATFGPAIAAVQKFHREKSASS

SEQ ID NO: 5348 - protein, 288 aa, Homo sapiens
MANETQKVGAIHFPFPFTPYSIQEDFMAELYRVLEAGKIGIFESPTGTGKSLSLICGALSWLRDFEQKKREEEARLLETGTGPLHDEKDESLCLSSSCEGAAGTPRPAGEPAWVTQFVQKKEERDLVDRLKAEQARRKQREERLQQLQHRVQLKYAAKRLRQEEEERENLLRLSREMLETGPEAERLEQLESGEEELVLAEYESDEEKKVASRAPSDATSSRHPPDASFPAALNFLQRTRPSSVLSEDLLMQRAVAKHPALLPWQMSSSPLRPGSEWMRMRMTWRKNT

SEQ ID NO: 5349 - protein, 456 aa, Homo sapiens
MAFAETYPAASSLPNGDCGRPRARPGGNRVTVVLGAQWGDEGKGKVVDLLAQDADIVCRCQGGNNAGHTVVVDSVEYDFHLLPSGIINPNVTAFIGNGVVIHLPGLFEEAEKNVQKGKGLEGWEKRLIISDRAHIVFDFHQAADGIQEQQRQEQAGKNLGTTKKGIGPVYSSKAARSGLRMCDLVSDFDGFSERFKVLANQYKSIYPTLEIDIEGELQKLKGYMEKIKPMVRDGVYFLYEALHGPPKKILVEGANAALLDIDFGTYPFVTSSNCTVGGVCTGLGMPPQNVGEVYGVVKAYTTRVGIGAFPTEQDNEIGELLQTRGREFGVTTGRKRRCGWLDLVLLKYAHMINGFTALALTKLDILDMFTEIKVGVAYKLDGEIIPHIPANQEVLNKVEVQYKTLPGWNTDISNARAFKELPVNAQNYVRFIEDELQIPVKWIGVGKSRESMIQLF

SEQ ID NO: 5350 - protein, 472 aa, Homo sapiens
MSNIYIQEPPTNGKVLLKTTAGDIDIELWSKEAPKACRNFIQLCLEAYYDNTIFHRVVPGFIVQGGDPTGTGSGGESIYGAPFKDEFHSRLRFNRRGLVAMANAGSHDNGSQFFFTLGRADELNNKHTIFGKVTGDTVYNMLRLSEVDIDDDERPHNPHKIKSCEVLFNPFDDIIPREIKRLKKEKPEEEVKKLKPKGTKNFSLLSFGEEAEEEEEEVNRVSQSMKGKSKSSHDLLKDDPHLSSVPVVESEKGDAPDLVDDGEDESAEHDEYIDGDEKNLMRERIAKKLKKDTSANVKSAGEGEVEKKSVSRSEELRKEARQLKRELLAAKQKKVENAAKQAEKRSEEEEAPPDGAVAEYRREKQKYEALRKQQSKKGTSREDQTLALLNQFKSKLTQAIAETPENDIPETEVEDDEGWMSHVLQFEDKSRKVKDASMQDSDTFEIYDPRNPVNKRRREESKKLMREKKERR

SEQ ID NO: 5351 - protein, 68 aa, Homo sapiens
MALARAWKQMSWFYYQYLLVTALYMLEPWERTVFNSMLVSIVGMALYTGYVFMPQHIMAILHYFEIVQ

SEQ ID NO: 5352 - protein, 386 aa, Homo sapiens
MHARGPHGQLSPALPLASSVLMLLMSTLWLVGAGPGLVLAPELLLDPWQVHRLLTHALGHTALPGLLLSLLLLPTVGWQQECHLGTLRFLHASALLALASGLLAVLLAGLGLSSAAGSCGYMPVHLAMLAGEGHRPRRPRGALPPWLSPWLLLALTPLLSSEPPFLQLLCGLLAGLAYAAGAFRWLEPSERRLQVLQEGVLCRTLAGCWPLRLLATPGSLAELPVTHPAGVRPPIPGPPYVASPDLWSHWEDSALPPPSLRPVQPTWEGSSEAGLDWAGASFSPGTPMWAALDEQMLQEGIQASLLDGPAQEPQSAPWLSKSSVSSLRLQQLERMGFPTEQAVVALAATGRVEGAVSLLVGGQVGTETLVTHGKGGPAHSEGPGPP

SEQ ID NO: 5353 - protein, 449 aa, Homo sapiens
MATQAKRPRVAGPVDGGDLDPVACFLSWCRRVGLELSPKVAVSRQGTVAGYGMVARESVQAGELLFVVPRAALLSQHTCSIGGLLERERVALQGQSGWVPLLLALLHELQAPASRWRPYFALWPELGRLEHPMFWPEEERRCLLQGTGVPEAVEKDLANIRSEYQSIVLPFMEAHPDLFSLRVRSLELYHQLVALVMAYSFQVPLEEEEDEKEPNSPVMVPAADILNHLANHNANLEYSANCLRMVATQPIPKGHEIFNTYGQMANWQLIHMYGFVEPYPDNTDDTADIQMVTVREAALQGTKTEAERHLVYERWDFLCKLEMVGEEGAFVIGREEVLTEEELTTTLKVLCMPAEEFRELKDQDGGGDDKREEGSLTITNIPKLKASWRQLLQNSVLLTLQTYATDLKTDQGLLSNKEVYAKLSWREQQALQVRYGQKMILHQLLELTS

SEQ ID NO: 5354 - protein, 430 aa, Homo sapiens
MDERLLGPPPPGGGRGGLGLVSGEPGGPGEPPGGGDPGGGSGGVPGGRGKQDIGDILQQIMTITDQSLDEAQAKKHALNCHRMKPALFSVLCEIKEKTGLSIRSSQEEEPVDPQLMRLDNMLLAEGVAGPEKGGGSAAAAAAAAASGGGVSPDNSIEHSDYRSKLAQIRHIYHSELEKYEQACNEFTTHVMNLLREQSRTRPVAPKEMERMVSIIHRKFSAIQMQLKQSTCEAVMILRSRFLDARRKRRNFSKQATEVLNEYFYSHLSNPYPSEEAKEELAKKCGITVSQVSNWFGNKRIRYKKNIGKFQEEANIYAVKTAVSVTQGGHSRTSSPTPPSSAGSGGSFNLSGSGDMFLGMPGLNGDSYSASQVESLRHSMGPGGYGDNLGGGQMYSPREMRANGSWQEAVTPSSVTSPTEGPGSVHSDTSN

SEQ ID NO: 5355 - protein, 578 aa, Homo sapiens
MLSCNICGETVTSEPDMKAHLIVHMESEIICPFCKLSGVNYDEMCFHIETAHFEQNTLERNFERINTVQYGTSDNKKDNTLQCGMEVNSSILSGCASNHPKNSAQNLTKDSTLKHEGFYSENLTESRKFLKSREKQSSLTEIKGSVYETTYSPPECPFCGKIEEHSEDMETHVKTKHANLLDIPLEDCDQPLYDCPMCGLICTNYHILQEHVDLHLEENSFQQGMDRVQCSGDLQLAHQLQQEEDRKRRSEESRQEIEEFQKLQRQYGLDNSGGYKQQQLRNMEIEVNRGRMPPSEFHRRKADMMESLALGFDDGKTKTSGIIEALHRYYQNAATDVRRVWLSSVVDHFHSSLGDKGWGCGYRNFQMLLSSLLQNDAYDDCLKGMLIPCIPKIQSMIEDAWKEGFDPQGASQLNNRLQGTKAWIGACEVYILLTSLRVKCHIVDFHKSTGPLGTHPRLFEWILNYYSSEGEGSPKVVCTSKPPIYLQHQGHSRTVIGIEEKKNRTLCLLILDPGCPSREMQKLLKQDIEASSLKQLRKSMGNLKHKQYQILAVEGALSLEEKLARRQASQVFTAEKIP

SEQ ID NO: 5356 - protein, 257 aa, Homo sapiens
MTAAVFFGCAFIAFGPALALYVFTIATEPLRIIFLIAGAFFWLVSLLISSLVWFMARVIIDNKDGPTQKYLLIFGAFVSVYIQEMFRFAYYKLLKKASEGLKSINPGETAPSMRLLAYVSGLGFGIMSGVFSFVNTLSDSLGPGTVGIHGDSPQFFLYSAFMTLVIILLHVFWGIVFFDGCEKKKWGILLIVLLTHLLVSAQTFISSYYGINLASAFIILVLMGTWAFLAAGGSCRSLKLCLLCQDKNFLLYNQRSR

SEQ ID NO: 5357 - protein, 663 aa, Homo sapiens
MAITLQPSDLIFEFASNGMDDDIHQLEDPSVFPAVIVEQVPYPDLLHLYSGLELDDVHNGIITDGTLCMTQDQILEGSFLLTDDNEATSHTMSTAEVLLNMESPSDILDEKQIFSTSEMLPDSDPAPAVTLPNYLFPASEPDALNRAGDTSDQEGHSLEEKASREESAKKTGKSKKRIRKTKGNRSTSPVTDPSIPIRKKSKDGKGSTIYLWEFLLALLQDRNTCPKYIKWTQREKGIFKLVDSKAVSKLWGKQKNKPDMNYETMGRALRYYYQRGILAKVEGQRLVYQFKEMPKDLVVIEDEDESSEATAAPPQASTASVASASTTRRTSSRVSSRSAPQGKGSSSWEKPKIQHVGLQPSASLELGPSLDEEIPTTSTMLVSPAEGQVKLTKAVSASSVPSNIHLGVAPVGSGSALTLQTIPLTTVLTNGPPASTTAPTQLVLQSVPAASTFKDTFTLQASFPLNASFQDSQVAAPGAPLILSGLPQLLAGANRPTNPAPPTVTGAGPAGPSSQPPGTVIAAFIRTSGTTAAPRVKEGPLRSSSYVQGMVTGAPMEGLLVPEETLRELLRDQAHLQPLPTQVVSRGSHNPSLLGNQTLSPPSRPTVGLTPVAELELSSGSGSLLMAEPSVTTSGSLLTRSPTPAPFSPFNPTSLIKMEPHDI

SEQ ID NO: 5358 - protein, 721 aa, Homo sapiens
MAAPVVAPPGVVVSRANKRSGAGPGGSGGGGARGAEEEPPPPLQAVLVADSFDRRFFPISKDQPRVLLPLANVALIDYTLEFLTATGVQETFVFCCWKAAQIKEHLLKSKWCRPTSLNVVRIITSELYRSLGDVLRDVDAKALVRSDFLLVYGDVISNINITRALEEHRLRRKLEKNVSVMTMIFKESSPSHPTRCHEDNVVVAVDSTTNRVLHFQKTQGLRRFAFPLSLFQGSSDGVEVRYDLLDCHISICSPQVAQLFTDNFDYQTRDDFVRGLLVNEEILGNQIHMHVTAKEYGARVSNLHMYSAVCADVIRRWVYPLTPEANFTDSTTQSCTHSRHNIYRGPEVSLGHGSILEENVLLGSGTVIGSNCFITNSVIGPGCHIGDNVVLDQTYLWQGVRVAAGAQIHQSLLCDNAEVKERVTLKPRSVLTSQVVVGPNITLPEGSVISLHPPDAEEDEDDGEFSDDSGADQEKDKVKMKGYNPAEVGAAGKGYLWKAAGMNMEEEEELQQNLWGLKINMEEESESESEQSMDSEEPDSRGGSPQMDDIKVFQNEVLGTLQRGKEENISCDNLVLEINSLKYAYNISLKEVMQVLSHVVLEFPLQQMDSPLDSSRYCALLLPLLKAWSPVFRNYIKRAADHLEALAAIEDFFLEHEALGISMAKVLMAFYQLEILAEETILSWFSQRDTTDKGQQLRKNQQLQRFIQWLKEAEEESSEDD

SEQ ID NO: 5359 - protein, 117 aa, Homo sapiens
MSSNVPADMINLRLILVSGKTKEFLFSPNDSASDIAKHVYDNWPMDWEEEQVSSPNILRLIYQGRFLHGNVTLGALKLPFGKTTVMHLVARETLPEPNSQGQRNREKTGESNCCVIL

SEQ ID NO: 5360 - protein, 848 aa, Homo sapiens
MTATVENLTFQKDTLGNAVDKNTSRLELRSYSLARRHGSTEPLVLAWSSQFRRLTWGCALDALHRSPCVAASQHGVTHLIRSSRTPHSTRCRKEDAQPGHHGNGAASVTAQARGQRSVLQVPLPVPRSCLFSESFVVSVSSQSRFLASVPGTGVQRSTAADMAASTAAGKQRIPKVAKVKNKAPAEVQITAEQLLREAKERELELLPPPPQQKITDEEELNDYKLRKRKTFEDNIRKNRTVISNWIKYAQWEESLKEIQRARSIYERALDVDYRNITLWLKYAEMEMKNRQVNHARNIWDRAITTLPRVNQFWYKYTYMEEMLGNVAGARQVFERWMEWQPEEQAWHSYINFELRYKEVDRARTIYERFVLVHPDVKNWIKYARFEEKHAYFAHARKVYERAVEFFGDEHMDEHLYVAFAKFEENQKEFERVRVIYKYALDRISKQDAQELFKNYTIFEKKFGDRRGIEDIIVSKRRFQYEEEVKANPHNYDAWFDYLRLVESDAEAEAVREVYERAIANVPPIQEKRHWKRYIYLWINYALYEELEAKDPERTRQVYQASLELIPHKKFTFAKMWILYAQFEIRQKNLSLARRALGTSIGKCPKNKLFKVYIELELQLREFDRCRKLYEKFLEFGPENCTSWIKFAELETILGDIDRARAIYELAISQPRLDMPEVLWKSYIDFEIEQEETERTRNLYRRLLQRTQHVKVWISFAQFELSSGKEGSLTKCRQIYEEANKTMRNCEEKEERLMLLESWRSFEEEFGTASDKERVDKLMPEKVKKRRKVQTDDGSDAGWEEYFDYIFPEDAANQPNLKLLAMAKLWKKQQQEKEDAEHHPDEDVDESES

SEQ ID NO: 5361 - protein, 450 aa, Homo sapiens
MATFSRQEFFQQLLQGCLLPTAQQGLDQIWLLLAICLACRLLWRLGLPSYLKHASTVAGGFFSLYHFFQLHMVWVVLLSLLCYLVLFLCRHSSHRGVFLSVTILIYLLMGEMHMVDTVTWHKMRGAQMIVAMKAVSLGFDLDRGEVGTVPSPVEFMGYLYFVGTIVFGPWISFHSYLQAVQGRPLSCRWLQKVARSLALALLCLVLSTCVGPYLFPYFIPLNGDRLLRKWLRAYESAVSFHFSNYFVGFLSEATATLAGAGFTEEKDHLEWDLTVSKPLNVELPRSMVEVVTSWNLPMSYWLNNYVFKNALRLGTFSAVLVTYAASALLHGFSFHLAAVLLSLAFITYVEHVLRKRLARILSACVLSKRCPPDCSHQHRLGLGVRALNLLFGALAIFHLAYLGSLFDVDVDDTTEEQGYGMAYTVHKWSELSWASHWVTFGCWIFYRLIG

SEQ ID NO: 5362 - protein, 456 aa, Homo sapiens
MATFSRQEFFQQLLQGCLLPTAQQGLDQIWLLLAICLACRLLWRLGLPSYLKHASTVAGGFFSLYHFFQLHMVWVVLLSLLCYLVLFLCRHSSHRGVFLSVTILIYLLMGEMHMVDTVTWHKMRGAQMIVAMKAVSLGFDLDRGEVGTVPSPVEFMGYLYFVGTIVFGPWISFHSYLQAVQGRPLSCRWLQKVARSLALALLCLVLSTCVGPYLFPYFIPLNGDRLLRNKKRKARWLRAYESAVSFHFSNYFVGFLSEATATLAGAGFTEEKDHLEWDLTVSKPLNVELPRSMVEVVTSWNLPMSYWLNNYVFKNALRLGTFSAVLVTYAASALLHGFSFHLAAVLLSLAFITYVEHVLRKRLARILSACVLSKRCPPDCSHQHRLGLGVRALNLLFGALAIFHLAYLGSLFDVDVDDTTEEQGYGMAYTVHKWSELSWASHWVTFGCWIFYRLIG

SEQ ID NO: 5363 - protein, 455 aa, Homo sapiens
MATFSRQEFFQQLLQGCLLPTAQQGLDQIWLLLAICLACRLLWRLGLPSYLKHASTVAGGFFSLYHFFQLHMVWVVLLSLLCYLVLFLCRHSSHRGVFLSVTILIYLLMGEMHMVDTVTWHKMRGAQMIVAMKAVSLGFDLDRGEVGTVPSPVEFMGYLYFVGTIVFGPWISFHSYLQAVQGRPLSCRWLQKVARSLALALLCLVLSTCVGPYLFPYFIPLNGDRLLRKGTMVRWLRAYESAVSFHFSNYFVGFLSEATATLAGAGFTEEKDHLEWDLTVSKPLNVELPRSMVEVVTSWNLPMSYWLNNYVFKNALRLGTFSAVLVTYAASALLHGFSFHLAAVLLSLAFITYVEHVLRKRLARILSACVLSKRCPPDCSHQHRLGLGVRALNLLFGALAIFHLAYLGSLFDVDVDDTTEEQGYGMAYTVHKWSELSWASHWVTFGCWIFYRLIG

SEQ ID NO: 5364 - protein, 461 aa, Homo sapiens
MATFSRQEFFQQLLQGCLLPTAQQGLDQIWLLLAICLACRLLWRLGLPSYLKHASTVAGGFFSLYHFFQLHMVWVVLLSLLCYLVLFLCRHSSHRGVFLSVTILIYLLMGEMHMVDTVTWHKMRGAQMIVAMKAVSLGFDLDRGEVGTVPSPVEFMGYLYFVGTIVFGPWISFHSYLQAVQGRPLSCRWLQKVARSLALALLCLVLSTCVGPYLFPYFIPLNGDRLLRNKKRKARGTMVRWLRAYESAVSFHFSNYFVGFLSEATATLAGAGFTEEKDHLEWDLTVSKPLNVELPRSMVEVVTSWNLPMSYWLNNYVFKNALRLGTFSAVLVTYAASALLHGFSFHLAAVLLSLAFITYVEHVLRKRLARILSACVLSKRCPPDCSHQHRLGLGVRALNLLFGALAIFHLAYLGSLFDVDVDDTTEEQGYGMAYTVHKWSELSWASHWVTFGCWIFYRLIG

SEQ ID NO: 5365 - protein, 379 aa, Homo sapiens
MVWVVLLSLLCYLVLFLCRHSSHRGVFLSVTILIYLLMGEMHMVDTVTWHKMRGAQMIVAMKAVSLGFDLDRGEVGTVPSPVEFMGYLYFVGTIVFGPWISFHSYLQAVQGRPLSCRWLQKVARSLALALLCLVLSTCVGPYLFPYFIPLNGDRLLRKWLRAYESAVSFHFSNYFVGFLSEATATLAGAGFTEEKDHLEWDLTVSKPLNVELPRSMVEVVTSWNLPMSYWLNNYVFKNALRLGTFSAVLVTYAASALLHGFSFHLAAVLLSLAFITYVEHVLRKRLARILSACVLSKRCPPDCSHQHRLGLGVRALNLLFGALAIFHLAYLGSLFDVDVDDTTEEQGYGMAYTVHKWSELSWASHWVTFGCWIFYRLIG

SEQ ID NO: 5366 - protein, 765 aa, Homo sapiens
MAGFKRGYDGKIAGLYDLDKTLGRGHFAVVKLARHVFTGEKVAVKVIDKTKLDTLATGHLFQEVRCMKLVQHPNIVRLYEVIDTQTKLYLILELGDEGDMFDYIMKHEEGLNEDLPKKYFAQIVHAISYCHKLHVVHRDLKPENVVFFEKQGLVKLTDFGFSNKFQPGKKLTTSCGSLAYSAPEILLGDEYDAPAVDIWSLGVILFMLVCGQPPFQEANDSETLTMIMDCKYTVPSHVSKECKDLITRMLQRDPKRRASLEEIENHPWLQGVDPSPATKYNIPLVSYKNLSEEEHNSIIQRMVLGDIADRDAIVEALETNRYNHITATYFLLAERILREKQEKEIQTRSASPSNIKAQFRQSWPTKIDVPQDLEDDLTATPLSHATVPQSPARAADSVLNGHRSKGLCDSAKKDDLPELAGPALSTVPPASLKPTASGRKCLFRVEEDEEEDEEDKKPMSLSTQVVLRRKPSVTNRLTSRKSAPVLNQIFEEGESDDEFDMDENLPPKLSRLKMNIASPGTVHKRYHRRKSQGRGSSCSSSETSDDDSESRRRLDKDSGFTYSWHRRDSSEGPPGSEGDGGGQSKPSNASGGVDKASPSENNAGGGSPSSGSGGNPTNTSGTTRRCAGPSNSMQLASRSAGELVESLKLMSLCLGSQLHGSTKYIIDPQNGLSFSSVKVQEKSTWKMCISSTGNAGQVPAVGGIKFFSDHMADTTTELERIKSKNLKNNVLQLPLCEKTISVNIQRNPKEGLLCASSPASCCHVI

SEQ ID NO: 5367 - protein, 530 aa, Homo sapiens
MLLWPLLLLLLLLPTLALLRQQRSQDARLSWLAGLQHRVAWGALVWAATWQRRRLEQSTLHVHQSQQQALRWCLQGAQRPHCSLRRSTDISTFRNHLPLTKASQTQQEDSGEQPLPPTSNQDLGEASLQATLLGLAALNKAYPEVLAQGRTARVTLTSPWPRPLPWPGNTLGQVGTPGTKDPRALLLDALRSPGLRALEAGTAVELLDVFLGLETDGEELAGAIAAGNPGAPLRERAAELREALEQGPRGLALRLWPKLQVVVTLDAGGQAEAVAALGALWCQGLAFFSPAYAASGGVLGLNLQPEQPHGLYLLPPGAPFIELLPVKEGTQEEAASTLLLAEAQQGKEYELVLTDRASLTRCRLGDVVRVVGAYNQCPVVRFICRLDQTLSVRGEDIGEDLFSEALGRAVGQWAGAKLLDHGCVESSILDSSAGSAPHYEVFVALRGLRNLSEENRDKLDHCLQEASPRYKSLRFWGSVGPARVHLVGQGAFRALRAALAACPSSPFPPAMPRVLRHRHLAQCLQERVVS

SEQ ID NO: 5368 - protein, 378 aa, Homo sapiens
MDLGKPMKSVLVVALLVIFQVCLCQDEVTDDYIGDNTTVDYTLFESLCSKKDVRNFKAWFLPIMYSIICFVGLLGNGLVVLTYIYFKRLKTMTDTYLLNLAVADILFLLTLPFWAYSAAKSWVFGVHFCKLIFAIYKMSFFSGMLLLLCISIDRYVAIVQAVSAHRHRARVLLISKLSCVGIWILATVLSIPELLYSDLQRSSSEQAMRCSLITEHVEAFITIQVAQMVIGFLVPLLAMSFCYLVIIRTLLQARNFERNKAIKVIIAVVVVFIVFQLPYNGVVLAQTVANFNITSSTCELSKQLNIAYDVTYSLACVRCCVNPFLYAFIGVKFRNDLFKLFKDLGCLSQEQLRQWSSCRHIRRSSMSVEAETTTTFSP

SEQ ID NO: 5369 - protein, 498 aa, Homo sapiens
MRPPACWWLLAPPALLALLTCSLAFGLASEDTKKEVKQSQDLEKSGISRKNDIDLKGIVFVIQSQSNSFHAKRAEQLKKSILKQAADLTQELPSVLLLHQLAKQEGAWTILPLLPHFSVTYSRNSSWIFFCEEETRIQIPKLLETLRRYDPSKEWFLGKALHDEEATIIHHYAFSENPTVFKYPDFAAGWALSIPLVNKLTKRLKSESLKSDFTIDLKHEIALYIWDKGGGPPLTPVPEFCTNDVDFYCATTFHSFLPLCRKPVKKKDIFVAVKTCKKFHGDRMPIVKQTWESQASLIEYYSDYTENSIPTVDLGIPNTDRGHCGKTFAILERFLNRSQDKTAWLVIVDDDTLISISRLQHLLSCYDSGKPVFLGERYGYGLGTGGYSYITGGGGMVFSREAVRRLLASKCRCYSNDAPDDMVLGMCFSGLGIPVTHSPLFHQARPVDYPKDYLSHQVPISFHKHWNIDPVKVYFTWLAPSDEDKARQETQKGFREEL

SEQ ID NO: 5370 - protein, 445 aa, Homo sapiens
MLCYVTRPDAVLMEVEVEAKANGEDCLNQVCRRLGIIEVDYFGLQFTGSKGESLWLNLRNRISQQMDGLAPYRLKLRVKFFVEPHLILQEQTRHIFFLHIKEALLAGHLLCSPEQAVELSALLAQTKFGDYNQNTAKYNYEELCAKELSSATLNSIVAKHKELEGTSQASAEYQVLQIVSAMENYGIEWHSVRDSEGQKLLIGVGPEGISICKDDFSPINRIAYPVVQMATQSGKNVYLTVTKESGNSIVLLFKMISTRAASGLYRAITETHAFYRCDTVTSAVMMQYSRDLKGHLASLFLNENINLGKKYVFDIKRTSKEVYDHARRALYNAGVVDLVSRNNQSPSHSPLKSSESSMNCSSCEGLSCQQTRVLQEKLRKLKEAMLCMVCCEEEINSTFCPCGHTVCCESCAAQLQSCPVCRSRVEHVQHVYLPTHTSLLNLTVI

SEQ ID NO: 5371 - protein, 248 aa, Homo sapiens
MFRFMRDVEPEDPMFLMDPFAIHRQHMSRMLSGGFGYSPFLSITDGNMPGTRPASRRMQQAGAVSPFGMLGMSGGFMDMFGMMNDMIGNMEHMTAGGNCQTFSSSTVISYSNTGDGAPKVYQETSEMRSAPGGIRETRRTVRDSDSGLEQMSIGHHIRDRAHILQRSRNHRTGDQEERQDYINLDESEAAAFDDEWRRETSRFRQQRPLEFRRLESSGAGGRRAEGPPRLAIQGPEDSPSRQSRRYDW

SEQ ID NO: 5372 - protein, 358 aa, Homo sapiens
MGNASNDSQSEDCETRQWLPPGESPAISSVMFSAGVLGNLIALALLARRWRGDVGCSAGRRSSLSLFHVLVTELVFTDLLGTCLISPVVLASYARNQTLVALAPESRACTYFAFAMTFFSLATMLMLFAMALERYLSIGHPYFYQRRVSRSGGLAVLPVIYAVSLLFCSLPLLDYGQYVQYCPGTWCFIRHGRTAYLQLYATLLLLLIVSVLACNFSVILNLIRMHRRSRRSRCGPSLGSGRGGPGARRRGERVSMAEETDHLILLAIMTITFAVCSLPFTIFAYMNETSSRKEKWDLQALRFLSINSIIDPWVFAILRPPVLRLMRSVLCCRISLRTQDATQTSCSTQSDASKQADL

SEQ ID NO: 5373 - protein, 395 aa, Homo sapiens
MAAEATAVAGSGAVGGCLAKDGLQQSKCPDTTPKRRRASSLSRDAERRAYQWCREYLGGAWRRVQPEELRVYPVSGGLSNLLFRCSLPDHLPSVGEEPREVLLRLYGAILQGVDSLVLESVMFAILAERSLGPQLYGVFPEGRLEQYIPSRPLKTQELREPVLSAAIATKMAQFHGMEMPFTKEPHWLFGTMERYLKQIQDLPPTGLPEMNLLEMYSLKDEMGNLRKLLESTPSPVVFCHNDIQEGNILLLSEPENADSLMLVDFEYSSYNYRGFDIGNHFCEWVYDYTHEEWPFYKARPTDYPTQEQQLHFIRHYLAEAKKGETLSQEEQRKLEEDLLVEVSRYALASHFFWGLWSILQASMSTIEFGYLDYAQSRFQFYFQQKGQLTSVHSSS

SEQ ID NO: 5374 - protein, 127 aa, Homo sapiens
MAAEATAVAGSGAVGGCLAKDGLQQSKCPDTTPKRRRASSLSRDAERRAYQWCREYLGGAWRRVQPEELRVYPVRWEVRGQPLRCADRGQGSAAGPSGCSMFSPPSCARAWGGAGPAWPGGGRGRGR

SEQ ID NO: 5375 - protein, 460 aa, Homo sapiens
MAPRSRRRRHKKPPSSVAPIIMAPTTIVTPVPLTPSKPGPSIDTLGFFSLDDNVPGLSQLILQKLNMKSYEEYKLVVDGGTPVSGFGFRCPQEMFQRMEDTFRFCAHCRALPSGLSDSKVLRHCKRCRNVYYCGPECQKSDWPAHRRVCQELRLVAVDRLMEWLLVTGDFVLPSGPWPWPPEAVQDWDSWFSMKGLHLDATLDAVLVSHAVTTLWASVGRPRPDPDVLQGSLKRLLTDVLSRPLTLGLGLRALGIDVRRTGGSTVHVVGASHVETFLTRPGDYDELGYMFPGHLGLRVVMVGVDVATGFSQSTSTSPLEPGTIQLSAHRGLYHDFWEEQVETGQTHHPDLVAAFHPGFHSSPDLMEAWLPTLLLLRDYKIPTLITVYSHQELVSSLQILVELDTHITAFGSNPFMSLKPEQVYSSPNKQPVYCSAYYIMFLGSSCQLDNRQLEEKVDGGI

SEQ ID NO: 5376 - protein, 213 aa, Homo sapiens
MAAPAVSGLSRQVRCFSTSVVRPFAKLVRPPVQVYGIEGRYATALYSAASKQNKLEQVEKELLRVAQILKEPKVAASVLNPYVKRSIKVKSLNDITAKERFSPLTTNLINLLAENGRLSNTQGVVSAFSTMMSVHRGEVPCTVTSASPLEEATLSELKTVLKSFLSQGQVLKLEAKTDPSILGGMIVRIGEKYVDMSVKTKIQKLGRAMREIV

SEQ ID NO: 5377 - protein, 223 aa, Homo sapiens
MKFVPCLLLVTLSCLGTLGQAPRQKQGSTGEEFHFQTGGRDSCTMRPSSLGQGAGEVWLRVDCRNTDQTYWCEYRGQPSMCQAFAADPKPYWNQALQELRRLHHACQGAPVLRPSVCREAGPQAHMQQVTSSLKGSPEPNQQPEAGTPSLRPKATVKLTEATQLGKDSMEELGKAKPTTRPTAKPTQPGPRPGGNEEAKKKAWEHCWKPFQALCAFLISFFRG

SEQ ID NO: 5378 - protein, 190 aa, Homo sapiens
MFQVPDSEGGRAGSRAMKPPGGESSNLFGSPEEATPSSRPNRMASNIFGPTEEPQNIPKRTNPPGGKGSGIFDESTPVQTRQHLNPPGGKTSDIFGSPVTATSRLAHPNKPKDHVFLCEGEEPKSDLKAARSIPAGAEPGEKGSARKAGPAKEQEPMPTVDSHEPRLGPRPRSHNKVLNPPGGKSSISFY

SEQ ID NO: 5379 - protein, 142 aa, Homo sapiens
MSESLVVCDVAEDLVEKLRKFRFRKETNNAAIIMKIDKDKRLVVLDEELEGISPDELKDELPERQPRFIVYSYKYQHDDGRVSYPLCFIFSSPVGCKPEQQMMYAGSKNKLVQTAELTKVFEIRNTEDLTEEWLREKLGFFH

SEQ ID NO: 5380 - protein, 206 aa, Homo sapiens
MRRTGAPAQADSRGRGRARGGCPGGEATLSQPPPRGGTRGQEPQMKETIMNQEKLAKLQAQVRIGGKGTARRKKKVVHRTATADDKKLQFSLKKLGVNNISGIEEVNMFTNQGTVIHFNNPKVQASLAANTFTITGHAETKQLTEMLPSILNQLGADSLTSLRRLAEALPKQSVDGKAPLATGEDDDDEVPDLVENFDEASKNEAN

SEQ ID NO: 5381 - protein, 162 aa, Homo sapiens
MKETIMNQEKLAKLQAQVRIGGKGTARRKKKVVHRTATADDKKLQFSLKKLGVNNISGIEEVNMFTNQGTVIHFNNPKVQASLAANTFTITGHAETKQLTEMLPSILNQLGADSLTSLRRLAEALPKQSVDGKAPLATGEDDDDEVPDLVENFDEASKNEAN

SEQ ID NO: 5382 - protein, 199 aa, Homo sapiens
MSSENCFVAENSSLHPESGQENDATSPHFSTRHEGSFQVPVLCAVMNVVFITILIIALIALSVGQYNCPGQYTFSMPSDSHVSSCSEDWVGYQRKCYFISTVKRSWTSAQNACSEHGATLAVIDSEKDMNFLKRYAGREEHWVGLKKEPGHPWKWSNGKEFNNWFNVTGSDKCVFLKNTEVSSMECEKNLYWICNKPYK

SEQ ID NO: 5383 - protein, 1094 aa, Homo sapiens
MSYEVTSGCHWTCQVPESCDNGLHCAGPLGHLHRRCQRTSAHLLVFTEHAEMRRFKRKHLTAIDCQHLARSHLAVTQPFGQRWTNRDPNHGLYPKPRTKRGSRGQGSQRCIPEFFLAGKQPCTNDMAKSNSVGQDSCQDSEGDMIFPAESSCALPQEGSAGPGSPGSAPPSRKRSWSSEEESNQATGTSRWDGVSKKAPRHHLSVPCTRPREARQEAEDSTSRLSAESGETDQDAGDVGPDPIPDSYYGLLGTLPCQEALSHICSLPSEVLRHVFAFLPVEDLYWNLSLVCHLWREIISDPLFIPWKKLYHRYLMNEEQAVSKVDGILSNCGIEKESDLCVLNLIRYTATTKCSPSVDPERVLWSLRDHPLLPEAEACVRQHLPDLYAAAGGVNIWALVAAVVLLSSSVNDIQRLLFCLRRPSSTVTMPDVTETLYCIAVLLYAMREKGINISNRIHYNIFYCLYLQENSCTQATKVKEEPSVWPGKKTIQLTHEQQLILNHKMEPLQVVKIMAFAGTGKTSTLVKYAEKWSQSRFLYVTFNKSIAKQAERVFPSNVICKTFHSMAYGHIGRKYQSKKKLNLFKLTPFMVNSVLAEGKGGFIRAKLVCKTLENFFASADEELTIDHVPIWCKNSQGQRVMVEQSEKLNGVLEASRLWDNMRKLGECTEEAHQMTHDGYLKLWQLSKPSLASFDAIFVDEAQDCTPAIMNIVLSQPCGKIFVGDPHQQIYTFRGAVNALFTVPHTHVFYLTQSFRFGVEIAYVGATILDVCKRVRKKTLVGGNHQSGIRGDAKGQVALLSRTNANVFDEAVRVTEGEFPSRIHLIGGIKSFGLDRIIDIWILLQPEEERRKQNLVIKDKFIRRWVHKEGFSGFKRYVTAAEDKELEAKIAVVEKYNIRIPELVQRIEKCHIEDLDFAEYILGTVHKAKGLEFDTVHVLDDFVKVPCARHNLPQLPHFRVESFSEDEWNLLYVAVTRAKKRLIMTKSLENILTLAGEYFLQAELTSNVLKTGVVRCCVGQCNNAIPVDTVLTMKKLPITYSNRKENKGGYLCHSCAEQRIGPLAFLTASPEQVRAMERTVENIVLPRHEALLFLVF

SEQ ID NO: 5384 - protein, 1043 aa, Homo sapiens
MRRFKRKHLTAIDCQHLARSHLAVTQPFGQRWTNRDPNHGLYPKPRTKRGSRGQGSQRCIPEFFLAGKQPCTNDMAKSNSVGQDSCQDSEGDMIFPAESSCALPQEGSAGPGSPGSAPPSRKRSWSSEEESNQATGTSRWDGVSKKAPRHHLSVPCTRPREARQEAEDSTSRLSAESGETDQDAGDVGPDPIPDSYYGLLGTLPCQEALSHICSLPSEVLRHVFAFLPVEDLYWNLSLVCHLWREIISDPLFIPWKKLYHRYLMNEEQAVSKVDGILSNCGIEKESDLCVLNLIRYTATTKCSPSVDPERVLWSLRDHPLLPEAEACVRQHLPDLYAAAGGVNIWALVAAVVLLSSSVNDIQRLLFCLRRPSSTVTMPDVTETLYCIAVLLYAMREKGINISNRIHYNIFYCLYLQENSCTQATKVKEEPSVWPGKKTIQLTHEQQLILNHKMEPLQVVKIMAFAGTGKTSTLVKYAEKWSQSRFLYVTFNKSIAKQAERVFPSNVICKTFHSMAYGHIGRKYQSKKKLNLFKLTPFMVNSVLAEGKGGFIRAKLVCKTLENFFASADEELTIDHVPIWCKNSQGQRVMVEQSEKLNGVLEASRLWDNMRKLGECTEEAHQMTHDGYLKLWQLSKPSLASFDAIFVDEAQDCTPAIMNIVLSQPCGKIFVGDPHQQIYTFRGAVNALFTVPHTHVFYLTQSFRFGVEIAYVGATILDVCKRVRKKTLVGGNHQSGIRGDAKGQVALLSRTNANVFDEAVRVTEGEFPSRIHLIGGIKSFGLDRIIDIWILLQPEEERRKQNLVIKDKFIRRWVHKEGFSGFKRYVTAAEDKELEAKIAVVEKYNIRIPELVQRIEKCHIEDLDFAEYILGTVHKAKGLEFDTVHVLDDFVKVPCARHNLPQLPHFRVESFSEDEWNLLYVAVTRAKKRLIMTKSLENILTLAGEYFLQAELTSNVLKTGVVRCCVGQCNNAIPVDTVLTMKKLPITYSNRKENKGGYLCHSCAEQRIGPLAFLTASPEQVRAMERTVENIVLPRHEALLFLVF

SEQ ID NO: 5385 - protein, 210 aa, Homo sapiens
MATETVELHKLKLAELKQECLARGLETKGIKQDLIHRLQAYLEEHAEEEANEEDVLGDETEEEETKPIELPVKEEEPPEKTVDVAAEKKVVKITSEIPQTERMQKRAERFNVPVSLESKKAARAARFGISSVPTKGLSSDNKPMVNLDKLKERAQRFGLNVSSISRKSEDDEKLKKRKERFGIVTSSAGTGTTEDTEAKKRKRAERFGIA

SEQ ID NO: 5386 - protein, 2240 aa, Homo sapiens
MLPCKKRRTTVTESLQHKGNQEENNVDLESAVKPESDQVKDLSSVSLSWDPSHGRVAGFEVQSLQDAGNQLGMEDTSLSSGMLTQNTNVPILEGVDVAISQGITLPSLESFHPLNIHIGKGKLHATGSKRGKKMTLRPGPVTQEDRCDHLTLKEPFSGEPSEEVKEEGGKPQMNSEGEIPSLPSGSQSAKPVSQPRKSTQPDVCASPQEKPLRTLFHQPEEEIEDGGLFIPMEEQDNEESEKRRKKKKGTKRKRDGRGQEGTLAYDLKLDDMLDRTLEDGAKQHNLTAVNVRNILHEVITNEHVVAMMKAAISETEDMPMFEPKMTRSKLKEVVEKGVVIPTWNISPIKKANEIKPPQFVDIHLEEDDSSDEEYQPDDEEEDETAEESLLESDVESTASSPRGAKKSRLRQSSEMTETDEESGILSEAEKVTTPAIRHISAEVVPMGPPPPPKPKQTRDSTFMEKLHAVDEELASSPVCMDSFQPMDDSLIAFRTRSKMPLKDVPLGQLEAELQAPDITPDMYDPNTADDEDWKMWLGGLMNDDVGNEDEADDDDDPEYNFLEDLDEPDTEDFRTDRAVRITKKEVNELMEELFETFQDEMGFSNMEDDGPEEEECVAEPRPNFNTPQALRFEEPLANLLNEQHRTVKELFEQLKMKKSSAKQLQEVEKVKPQSEKVHQTLILDPAQRKRLQQQMQQHVQLLTQIHLLATCNPNLNPEATTTRIFLKELGTFAQSSIALHHQYNPKFQTLFQPCNLMGAMQLIEDFSTHVSIDCSPHKTVKKTANEFPCLPKQVAWILATSKVFMYPELLPVCSLKAKNPQDKIVFTKAEDNLLALGLKHFEGTEFPNPLISKYLLTCKTAHQLTVRIKNLNMNRAPDNIIKFYKKTKQLPVLGKCCEEIQPHQWKPPIEREEHRLPFWLKASLPSIQEELRHMADGAREVGNMTGTTEINSDRSLEKDNLELGSESRYPLLLPKGVVLKLKPVATRFPRKAWRQKRSSVLKPLLIQPSPSLQPSFNPGKTPARSTHSEAPPSKMVLRIPHPIQPATVLQTVPGVPPLGVSGGESFESPAALPAVPPEARTSFPLSESQTLLSSAPVPKVMLPSLAPSKFRKPYVRRRPSKRRGVKASPCMKPAPVIHHPASVIFTVPATTVKIVSLGGGCNMIQPVNAAVAQSPQTIPITTLLVNPTSFPCPLNQSLVASSVSPLIVSGNSVNLPIPSTPEDKAHVNVDIACAVADGENAFQGLEPKLEPQELSPLSATVFPKVEHSPGPPLADAECQEGLSENSACRWTVVKTEEGRQALEPLPQGIQESLNNPTPGDLEEIVKMEPEEAREEISGSPERDICDDIKVEHAVELDTGAPSEELSSAGEVTKQTVLQKEEERSQPTKTPSSSQEPPDEGTSGTDVNKGSSKNALSSMDPEVRLSSPPGKPEDSSSVDGQSVGTPVGPETGGEKNGPEEEEEEDFDDLTQDEEDEMSSASEESVLSVPELQETMEKLTWLASERRMSQEGESEEENSQEENSEPEEEEEEEAEGMESLQKEDEMTDEAVGDSAEKPPTFASPETAPEVETSRTPPGESIKAAGKGRNNHRARNKRGSRARASKDTSKLLLLYDEDILERDPLREQKDLAFAQAYLTRVREALQHIPGKYEDFLQVIYEFESSTQRRTAVDLYKSLQILLQDWPQLLKDFAAFLLPEQALACGLFEEQQAFEKSRKFLRQLEICFAENPSHHQKIIKVLQGCADCLPQEITELKTQMWQLLKGHDHLQDEFSIFFDHLRPAASRMGDFEEINWTEEKEYEFDGFEEVALPDVEEEEEPPKIPTASKNKRKKEIGVQNHDKETEWPDGAKDCACSCHEGGPDSKLKKSKRRSCSHCSSKVCDSKSYKSKEPHELVGSSPHREASPMPGAKEAGQGKDMMEEEAPEERESTEATQSRTVRTTRKGEMPVSGLAVGSTLPSPREVTVTERLLLDGPPPHSPETPQFPPTTGAVLYTVKRNQVGPEVRSCPKASPRLQKEREGQKAVSESEALMLVWDASETEKLPGTVEPPASFLSPVSSKTRDAGRRHVSGKPDTQERWLPSSRARVKTRDRTCPVHESPSGIDTSETSPKAPRGGLAKDSGTQAKGPEGEQQPKAAEATVCANNSKVSSTGEKVVLWTREADRVILTMCQEQGAQPQTFNIISQQLGNKTPAEVSHRFRELMQLFHTACEASSEDEDDATSTSNADQLSDHGDLLSEEELDE

SEQ ID NO: 5387 - protein, 1529 aa, Homo sapiens
MLPCKKRRTTVTESLQHKGNQEENNVDLESAVKPESDQVKDLSSVSLSWDPSHGRVAGFEVQSLQDAGNQLGMEDTSLSSGMLTQNTNVPILEGVDVAISQGITLPSLESFHPLNIHIGKGKLHATGSKRGKKMTLRPGPVTQEDRCDHLTLKEPFSGEPSEEVKEEGGKPQMNSEGEIPSLPSGSQSAKPVSQPRKSTQPDVCASPQEKPLRTLFHQPEEEIEDGGLFIPMEEQDNEESEKRRKKKKGTKRKRDGRGQEGTLAYDLKLDDMLDRTLEDGAKQHNLTAVNVRNILHEVITNEHVVAMMKAAISETEDMPMFEPKMTRSKLKEVVEKGVVIPTWNISPIKKANEIKPPQFVDIHLEEDDSSDEEYQPDDEEEDETAEESLLESDVESTASSPRGAKKSRLRQSSEMTETDEESGILSEAEKVTTPAIRHISAEVVPMGPPPPPKPKQTRDSTFMEKLHAVDEELASSPVCMDSFQPMDDSLIAFRTRSKMPLKDVPLGQLEAELQAPDITPDMYDPNTADDEDWKMWLGGLMNDDVGNEDEADDDDDPEYNFLEDLDEPDTEDFRTDRAVRITKKEVNELMEELFETFQDEMGFSNMEDDGPEEEECVAEPRPNFNTPQALRFEEPLANLLNEQHRTVKELFEQLKMKKSSAKQLQEVEKVKPQSEKVHQTLILDPAQRKRLQQQMQQHVQLLTQIHLLATCNPNLNPEATTTRIFLKELGTFAQSSIALHHQYNPKFQTLFQPCNLMGAMQLIEDFSTHVSIDCSPHKTVKKTANEFPCLPKQVAWILATSKVFMYPELLPVCSLKAKNPQDKIVFTKAEDNLLALGLKHFEGTEFPNPLISKYLLTCKTAHQLTVRIKNLNMNRAPDNIIKFYKKTKQLPVLGKCCEEIQPHQWKPPIEREEHRLPFWLKASLPSIQEELRHMADGAREVGNMTGTTEINSDRSLEKDNLELGSESRYPLLLPKGVVLKLKPVATRFPRKAWRQKRSSVLKPLLIQPSPSLQPSFNPGKTPARSTHSEAPPSKMVLRIPHPIQPATVLQTVPGVPPLGVSGGESFESPAALPAVPPEARTSFPLSESQTLLSSAPVPKVMLPSLAPSKFRKPYVRRRPSKRRGVKASPCMKPAPVIHHPASVIFTVPATTVKIVSLGGGCNMIQPVNAAVAQSPQTIPITTLLVNPTSFPCPLNQSLVASSVSPLIVSGNSVNLPIPSTPEDKAHVNVDIACAVADGENAFQGLEPKLEPQELSPLSATVFPKVEHSPGPPLADAECQEGLSENSACRWTVVKTEEGRQALEPLPQGIQESLNNPTPGDLEEIVKMEPEEAREEISGSPERDICDDIKVEHAVELDTGAPSEELSSAGEVTKQTVLQKEEERSQPTKTPSSSQEPPDEGTSGTDVNKGSSKNALSSMDPEVRLSSPPGKPEDSSSVDGQSVGTPVGPETGGEKNGPEEEEEEDFDDLTQDEEDEMSSASEESVLSVPELQVRAGEYSQVFRGLSNMYHLLICHLLACCTMDSPKIICI

SEQ ID NO: 5388 - protein, 172 aa, Homo sapiens
MEEHLSVMYERLRQELPKLFLQSHDYSLYSLDVEFINEILNIRTKGRTWYILSLTLCRFLAWNYFAHLRLEVLQLTRHPENWTLQARWRLVGLPVHLLFLRFYKRDKDEHYRTYDAYSTFYLNSSGLICRHRLDKLMPSHSPPTPVKKLLVGALVALGLSEPEPDLNLCSKP

SEQ ID NO: 5389 - protein, 372 aa, Homo sapiens
MSLRCGDAARTLGPRVFGRYFCSPVRPLSSLPDKKKELLQNGPDLQDFVSGDLADRSTWDEYKGNLKRQKGERLRLPPWLKTEIPMGKNYNKLKNTLRNLNLHTVCEEARCPNIGECWGGGEYATATATIMLMGDTCTRGCRFCSVKTARNPPPLDASEPYNTAKAIAEWGLDYVVLTSVDRDDMPDGGAEHIAKTVSYLKERNPKILVECLTPDFRGDLKAIEKVALSGLDVYAHNVETVPELQSKVRDPRANFDQSLRVLKHAKKVQPDVISKTSIMLGLGENDEQVYATMKALREADVDCLTLGQYMQPTRRHLKVEEYITPEKFKYWEKVGNELGFHYTASGPLVRSSYKAGEFFLKNLVAKRKTKDL

SEQ ID NO: 5390 - protein, 322 aa, Homo sapiens
MSLRCGDAARTLGPRVFGRYFCSPVRPLSSLPDKKKELLQNGPDLQDFVSGDLADRSTWDEYKGNLKRQKGERLRLPPWLKTEIPMGKNYNKLKNTLRNLNLHTVCEEARCPNIGECWGGGEYATATATIMLMGDTCTRGCRFCSVKTARNPPPLDASEPYNTAKAIAEWGLDYVVLTSVDRDDMPDGGAEHIAKTVSYLKERNPKILVECLTPDFRGDLKAIEKVALSGLDVYAHNVETVPELQSKVRDPRANFDQSLRVLKHAKKVQPDVISKTSIMLGLGENDEQVYATMKALREADVDCLTLGQYMQPTRRHLKVNFS

SEQ ID NO: 5391 - protein, 931 aa, Homo sapiens
MAARDSDSEEDLVSYGTGLEPLEEGERPKKPIPLQDQTVRDEKGRYKRFHGAFSGGFSAGYFNTVGSKEGWTPSTFVSSRQNRADKSVLGPEDFMDEEDLSEFGIAPKAIVTTDDFASKTKDRIREKARQLAAATAPIPGATLLDDLITPAKLSVGFELLRKMGWKEGQGVGPRVKRRPRRQKPDPGVKIYGCALPPGSSEGSEGEDDDYLPDNVTFAPKDVTPVDFTPKDNVHGLAYKGLDPHQALFGTSGEHFNLFSGGSERAGDLGEIGLNKGRKLGISGQAFGVGALEEEDDDIYATETLSKYDTVLKDEEPGDGLYGWTAPRQYKNQKESEKDLRYVGKILDGFSLASKPLSSKKIYPPPELPRDYRPVHYFRPMVAATSENSHLLQVLSESAGKATPDPGTHSKHQLNASKRAELLGETPIQGSATSVLEFLSQKDKERIKEMKQATDLKAAQLKARSLAQNAQSSRAQLSPAAAAGHCSWNMALGGGTATLKASNFKPFAKDPEKQKRYDEFLVHMKQGQKDALERCLDPSMTEWERGRERDEFARAALLYASSHSTLSSRFTHAKEEDDSDQVEVPRDQENDVGDKQSAVKMKMFGKLTRDTFEWHPDKLLCKRFNVPDPYPDSTLVGLPRVKRDKYSVFNFLTLPETASLPTTQASSEKVSQHRGPDKSRKPSRWDTSKHEKKEDSISEFLSLARSKAEPPKQQSSPLVNKEEEHAPELSANQTVNKDVDAQAEGEGSRPSMDLFRAIFASSSDEKSSSSEDEQGDSEDDQAGSGEANFQSSQDTDLGETSSVAHALVPAPQEPPPSFPIQKMQIDEREEFGPRLPPVFCPNARQTLEVPQKEKHKKNKDKHKAKKEHRRKKEKKKKHRKHKHKGKQKNKKPEKSSSSESSDSSDSQSDEETADVSPQELLRRLKSLPLRRQ

SEQ ID NO: 5392 - protein, 544 aa, Homo sapiens
MIHVRRHETRRNSKSHVPEQKSRVDWRRTKRSSISQLLDSDEELDSEEFDSDEELDSDESFENDEELDSNKGPDCNKTPGSERELNLSKIQSEGNDSKCLINSGNGSTYEEETNKIKHRNIDLQDQEKHLSQEDNDLNKQTGQIIEDDQEKHLSQEDNDLNKQTGQIIEDDLEEEDIKRGKRKRLSSVMCDSDESDDSDILVRKVGVKRPRRVVEDEGSSVEMEQKTPEKTLAAQKREKLQKLKELSKQRSRQRRSSGRDFEDSEKESCPSSDEVDEEEEEDNYESDEDGDDYIIDDFVVQDEEGDEENKNQQGEKLTTSQLKLVKQNSLYSFSDHYTHFERVVKALLINALDESFLGTLYDGTRQKSYAKDMLTSLHYLDNRFVQPRLESLVSRSRWKEQYKERVENYSNVSIHLKNPENCSCQACGLHRYCKYSVHLSGELYNTRTMQIDNFMSHDKQVFTVGRICASRTRIYHKLKHFKFKLYQECCTIAMTEEVEDEQVKETVERIFRRSKENGWIKEKYGQLEEYLNFADYFQEEKFEL

SEQ ID NO: 5393 - protein, 212 aa, Homo sapiens
MDYLLMIFSLLFVACQGAPETAVLGAELSAVGENGGEKPTPSPPWRLRRSKRCSCSSLMDKECVYFCHLDIIWVNTPEHVVPYGLGSPRSKRALENLLPTKATDRENRCQCASQKDKKCWNFCQAGKELRAEDIMEKDWNNHKKGKDCSKLGKKCIYQQLVRGRKIRRSSEEHLRQTRSETMRNSVKSSFHDPKLKGNPSRERYVTHNRAHW

SEQ ID NO: 5394 - protein, 635 aa, Homo sapiens
MSGAGRALAALLLAASVLSAALLAPGGSSGRDAQAAPPRDLDKKRHAELKMDQALLLIHNELLWTNLTVYWKSECCYHCLFQVLVNVPQSPKAGKPSAAAASVSTQHGSILQLNDTLEEKEVCRLEYRFGEFGNYSLLVKNIHNGVSEIACDLAVNEDPVDSNLPVSIAFLIGLAVIIVISFLRLLLSLDDFNNWISKAISSRETDRLINSELGSPSRTDPLDGDVQPATWRLSALPPRLRSVDTFRGIALILMVFVNYGGGKYWYFKHASWNGLTVADLVFPWFVFIMGSSIFLSMTSILQRGCSKFRLLGKIAWRSFLLICIGIIIVNPNYCLGPLSWDKVRIPGVLQRLGVTYFVVAVLELLFAKPVPEHCASERSCLSLRDITSSWPQWLLILVLEGLWLGLTFLLPVPGCPTGYLGPGGIGDFGKYPNCTGGAAGYIDRLLLGDDHLYQHPSSAVLYHTEVAYDPEGILGTINSIVMAFLGVQAGKILLYYKARTKDILIRFTAWCCILGLISVALTKVSENEGFIPVNKNLWSLSYVTTLSSFAFFILLVLYPVVDVKGLWTGTPFFYPGMNSILVYVGHEVFENYFPFQWKLKDNQSHKEHLTQNIVATALWVLIAYILYRKKIFWKI

SEQ ID NO: 5395 - protein, 812 aa, Homo sapiens
MGVHTPRPAPFHFVSLAGGSFKRWGRLVASKSCLSLWVINALGAGTLQSCLLRRFPKQGPRALTPVRRVAGGGGSLAECGWRRGRGSGRRDPTNWQPGGGPAEDRGGSDSPCTQSTVRRDLEQGPFPEGLAPEDVAPEPCDPLASAGGKPGAGTRVRPALGLNLRGCAAGEEPRRRRSAAVWEGDSFFLKLNIKLSFEVIFDDLFDGLVIGSFGRVYLDKKRHAELKMDQALLLIHNELLWTNLTVYWKSECCYHCLFQVLVNVPQSPKAGKPSAAAASVSTQHGSILQLNDTLEEKEVCRLEYRFGEFGNYSLLVKNIHNGVSEIACDLAVNEDPVDSNLPVSIAFLIGLAVIIVISFLRLLLSLDDFNNWISKAISSRETDRLINSELGSPSRTDPLDGDVQPATWRLSALPPRLRSVDTFRGIALILMVFVNYGGGKYWYFKHASWNGLTVADLVFPWFVFIMGSSIFLSMTSILQRGCSKFRLLGKIAWRSFLLICIGIIIVNPNYCLGPLSWDKVRIPGVLQRLGVTYFVVAVLELLFAKPVPEHCASERSCLSLRDITSSWPQWLLILVLEGLWLGLTFLLPVPGCPTGYLGPGGIGDFGKYPNCTGGAAGYIDRLLLGDDHLYQHPSSAVLYHTEVAYDPEGILGTINSIVMAFLGVQAGKILLYYKARTKDILIRFTAWCCILGLISVALTKVSENEGFIPVNKNLWSLSYVTTLSSFAFFILLVLYPVVDVKGLWTGTPFFYPGMNSILVYVGHEVFENYFPFQWKLKDNQSHKEHLTQNIVATALWVLIAYILYRKKIFWKI

SEQ ID NO: 5396 - protein, 310 aa, Homo sapiens
MGLCKCPKRKVTNLFCFEHRVNVCEHCLVANHAKCIVQSYLQWLQDSDYNPNCRLCNIPLASRETTRLVCYDLFHWACLNERAAQLPRNTAPAGYQCPSCNGPIFPPTNLAGPVASALREKLATVNWARAGLGLPLIDEVVSPEPEPLNTSDFSDWSSFNASSTPGPEEVDSASAAPAFYSQAPRPPASPGRPEQHTVIHMGNPEPLTHAPRKVYDTRDDDRTPGLHGDCDDDKYRRRPALGWLARLLRSRAGSRKRPLTLLQRAGLLLLLGLLGFLALLALMSRLGRAAADSDPNLDPLMNPHIRVGPS

SEQ ID NO: 5397 - protein, 986 aa, Homo sapiens
MERMNWLSRLASRGPGHRIPQGANLQTPVMADPETCLMVFKNHWSQVVRILERQGPRAAPGGADDLSAVRNHTYQMLTLLAEDRAVPSAPTGPGSLLEFALHEDLLTRVLTWQLQWDELGDGVEERRAEQLKLFEVLVSEARQPLLRHGPVREALLTLLDACGRPVPSSPALDEGLVLLLSQLCVCVAQEPSLLEFFLQPPPEPGAAPRLLLFSRLVPFVHREGTLGQQARDALLLLMALSAGSPTVGRYIADHSYFCPVLATGLSALYSSLPRKIEVPGDDWHCLRREDWLGVPALALFMSSLEFCNAVIQVAHPLVQKQLVDYIHNGFLVPVMGPALHKTSVEEMIASTAYLELFLRSISEPALLRTFLRFLLLHRHDTHTILDTLVARIGSNSRLCMVSLSLFRTLLNLSCEDVLLQLVLRYLVPCNHVMLSQKPAVRDVDLYGRAADKFLSLIPRCCRHHAPSPPRPEHASWARGGPSRETGRREDITGPGSPSVDSSSVTTVPRPSTPSRLVLFLRQQSLGGSESPGPAPCSPGLSASPASSPGRRPTPAEEPGELEDNYLEYLREARRGVDRCVRACRTWSAPYDGERPSPEPSPFGSRTKKRSLLPEEDRNNVGEGEEEELGRRGRAGGAGEGPGHLPPPQLNGVPGSWPEGAKKVRLVPKEGAGELLEGISEGMAGLEGFGQELRELEVALSNGGTGSESPLEPPLPLEEEEAYESFTCPPEPPGPFLSSPLRTLNQLPSQPFTGPFMAVLFAKLENMLQNSVYVNFLLTGLVAQLACHPQPLLRSFLLNTNMVFQPSVKSLLQVLGSVKNKIENFAASQEDFPALLSKAKKYLIARGKLDWAEGPAAGPAPRRSDPLVKSRRPSLGELLLRHAHSPTRARQAAQLVLQPGRDGAGLGLSGGSPGASTPVLLTRGGAPERQGEALRVKNAVYCAVIFPEFLKELAAISQAHAVTSPFLLETSEEGSGPLISGCGPLNP

SEQ ID NO: 5398 - protein, 468 aa, Homo sapiens
MAARLVSRCGAVRAAPHSGPLVSWRRWSGASTDTVYDVVVSGGGLVGAAMACALGYDIHFHDKKILLLEAGPKKVLEKLSETYSNRVSSISPGSATLLSSFGAWDHICNMRYRAFRRMQVWDACSEALIMFDKDNLDDMGYIVENDVIMHALTKQLEAVSDRVTVLYRSKAIRYTWPCPFPMADSSPWVHITLGDGSTFQTKLLIGADGHNSGVRQAVGIQNVSWNYDQSAVVATLHLSEATENNVAWQRFLPSGPIALLPLSDTLSSLVWSTSHEHAAELVSMDEEKFVDAVNSAFWSDADHTDFIDTAGAMLQYAVSLLKPTKVSARQLPPSVARVDAKSRVLFPLGLGHAAEYVRPRVALIGDAAHRVHPLAGQGVNMGFGDISSLAHHLSTAAFNGKDLGSVSHLTGYETERQRHNTALLAATDLLKRLYSTSASPLVLLRTWGLQATNAVSPLKEQIMAFASK

SEQ ID NO: 5399 - protein, 393 aa, Homo sapiens
MIFTFMTRKSCCSKQVQRKYWRNCQKLTATGSAPFPLALQRFSVVWDACSEALIMFDKDNLDDMGYIVENDVIMHALTKQLEAVSDRVTVLYRSKAIRYTWPCPFPMADSSPWVHITLGDGSTFQTKLLIGADGHNSGVRQAVGIQNVSWNYDQSAVVATLHLSEATENNVAWQRFLPSGPIALLPLSDTLSSLVWSTSHEHAAELVSMDEEKFVDAVNSAFWSDADHTDFIDTAGAMLQYAVSLLKPTKVSARQLPPSVARVDAKSRVLFPLGLGHAAEYVRPRVALIGDAAHRVHPLAGQGVNMGFGDISSLAHHLSTAAFNGKDLGSVSHLTGYETERQRHNTALLAATDLLKRLYSTSASPLVLLRTWGLQATNAVSPLKEQIMAFASK

SEQ ID NO: 5400 - protein, 344 aa, Homo sapiens
MGFNLTFHLSYKFRLLLLLTLCLTVVGWATSNYFVGAIQEIPKAKEFMANFHKTLILGKGKTLTNEASTKKVELDNCPSVSPYLRGQSKLIFKPDLTLEEVQAENPKVSRGRYRPQECKALQRVAILVPHRNREKHLMYLLEHLHPFLQRQQLDYGIYVIHQAEGKKFNRAKLLNVGYLEALKEENWDCFIFHDVDLVPENDFNLYKCEEHPKHLVVGRNSTGYRLRYSGYFGGVTALSREQFFKVNGFSNNYWGWGGEDDDLRLRVELQRMKISRPLPEVGKYTMVFHTRDKGNEVNAERMKLLHQVSRVWRTDGLSSCSYKLVSVEHNPLYINITVDFWFGA

SEQ ID NO: 5401 - protein, 344 aa, Homo sapiens; identical to SEQ ID NO: 5400

SEQ ID NO: 5402 - protein, 541 aa, Homo sapiens
MASMGTLAFDEYGRPFLIIKDQDRKSRLMGLEALKSHIMAAKAVANTMRTSLGPNGLDKMMVDKDGDVTVTNDGATILSMMDVDHQIAKLMVELSKSQDDEIGDGTTGVVVLAGALLEEAEQLLDRGIHPIRIADGYEQAARVAIEHLDKISDSVLVDIKDTEPLIQTAKTTLGSKVVNSCHRQMAEIAVNAVLTVADMERRDVDFELIKVEGKVGGRLEDTKLIKGVIVDKDFSHPQMPKKVEDAKIAILTCPFEPPKPKTKHKLDVTSVEDYKALQKYEKEKFEEMIQQIKETGANLAICQWGFDDEANHLLLQNNLPAVRWVGGPEIELIAIATGGRIVPRFSELTAEKLGFAGLVQEISFGTTKDKMLVIEQCKNSRAVTIFIRGGNKMIIEEAKRSLHDALCVIRNLIRDNRVVYGGGAAEISCALAVSQEADKCPTLEQYAMRAFADALEVIPMALSENSGMNPIQTMTEVRARQVKEMNPALGIDCLHKGTNDMKQQHVIETLIGKKQQISLATQMVRMILKIDDIRKPGESEE

SEQ ID NO: 5403 - protein, 822 aa, Homo sapiens
MGKKRTKGKTVPIDDSSETLEPVCRHIRKGLEQGNLKKALVNVEWNICQDCKTDNKVKDKAEEETEEKPSVWLCLKCGHQGCGRNSQEQHALKHYLTPRSEPHCLVLSLDNWSVWCYVCDNEVQYCSSNQLGQVVDYVRKQASITTPKPEKDNGNIELENKKLEKESKNEQEREKKENMAKENPPMNSPCQITVKGLSNLGNTCFFNAVMQNLSQTPVLRELLKEVKMSGTIVKIEPPDLALTEPLEINLEPPGPLTLAMSQFLNEMQETKKGVVTPKELFSQVCKKAVRFKGYQQQDSQELLRYLLDGMRAEEHQRVSKGILKAFGNSTEKLDEELKNKVKDYEKKKSMPSFVDRIFGGELTSMIMCDQCRTVSLVHESFLDLSLPVLDDQSGKKSVNDKNLKKTVEDEDQDSEEEKDNDSYIKERSDIPSGTSKHLQKKAKKQAKKQAKNQRRQQKIQGKVLHLNDICTIDHPEDSEYEAEMSLQGEVNIKSNHISQEGVMHKEYCVNQKDLNGQAKMIESVTDNQKSTEEVDMKNINMDNDLEVLTSSPTRNLNGAYLTEGSNGEVDISNGFKNLNLNAALHPDEINIEILNDSHTPGTKVYEVVNEDPETAFCTLANREVFNTDECSIQHCLYQFTRNEKLRDANKLLCEVCTRRQCNGPKANIKGERKHVYTNAKKQMLISLAPPVLTLHLKRFQQAGFNLRKVNKHIKFPEILDLAPFCTLKCKNVAEENTRVLYSLYGVVEHSGTMRSGHYTAYAKARTANSHLSNLVLHGDIPQDFEMESKGQWFHISDTHVQAVPTTKVLNSQAYLLFYERIL

SEQ ID NO: 5404 - protein, 823 aa, Homo sapiens
MGKKRTKGKTVPIDDSSETLEPVCRHIRKGLEQGNLKKALVNVEWNICQDCKTDNKVKDKAEEETEEKPSVWLCLKCGHQGCGRNSQEQHALKHYLTPRSEPHCLVLSLDNWSVWCYVCDNEVQYCSSNQLGQVVDYVRKQASITTPKPAEKDNGNIELENKKLEKESKNEQEREKKENMAKENPPMNSPCQITVKGLSNLGNTCFFNAVMQNLSQTPVLRELLKEVKMSGTIVKIEPPDLALTEPLEINLEPPGPLTLAMSQFLNEMQETKKGVVTPKELFSQVCKKAVRFKGYQQQDSQELLRYLLDGMRAEEHQRVSKGILKAFGNSTEKLDEELKNKVKDYEKKKSMPSFVDRIFGGELTSMIMCDQCRTVSLVHESFLDLSLPVLDDQSGKKSVNDKNLKKTVEDEDQDSEEEKDNDSYIKERSDIPSGTSKHLQKKAKKQAKKQAKNQRRQQKIQGKVLHLNDICTIDHPEDSEYEAEMSLQGEVNIKSNHISQEGVMHKEYCVNQKDLNGQAKMIESVTDNQKSTEEVDMKNINMDNDLEVLTSSPTRNLNGAYLTEGSNGEVDISNGFKNLNLNAALHPDEINIEILNDSHTPGTKVYEVVNEDPETAFCTLANREVFNTDECSIQHCLYQFTRNEKLRDANKLLCEVCTRRQCNGPKANIKGERKHVYTNAKKQMLISLAPPVLTLHLKRFQQAGFNLRKVNKHIKFPEILDLAPFCTLKCKNVAEENTRVLYSLYGVVEHSGTMRSGHYTAYAKARTANSHLSNLVLHGDIPQDFEMESKGQWFHISDTHVQAVPTTKVLNSQAYLLFYERIL

SEQ ID NO: 5405 - protein, 823 aa, Homo sapiens; identical to SEQ ID NO: 5404

SEQ ID NO: 5406 - protein, 377 aa, Homo sapiens
MAEEVVVVAKFDYVAQQEQELDIKKNERLWLLDDSKSWWRVRNSMNKTGFVPSNYVERKNSARKASIVKNLKDTLGIGKVKRKPSVPDSASPADDSFVDPGERLYDLNMPAYVKFNYMAEREDELSLIKGTKVIVMEKCSDGWWRGSYNGQVGWFPSNYVTEEGDSPLGDHVGSLSEKLAAVVNNLNTGQVLHVVQALYPFSSSNDEELNFEKGDVMDVIEKPENDPEWWKCRKINGMVGLVPKNYVTVMQNNPLTSGLEPSPPQCDYIRPSLTGKFAGNPWYYGKVTRHQAEMALNERGHEGDFLIRDSESSPNDFSVSLKAQGKNKHFKVQLKETVYCIGQRKFSTMEELVEHYKKAPIFTSEQGEKLYLVKHLS

SEQ ID NO: 5407 - protein, 755 aa, Homo sapiens
MASVHESLYFNPMMTNGVVHANVFGIKDWVTPYKIAVLVLLNEMSRTGEGAVSLMERRRLNQLLLPLLQGPDITLSKLYKLIEESCPQLANSVQIRIKLMAEGELKDMEQFFDDLSDSFSGTEPEVHKTSVVGLFLRHMILAYSKLSFSQVFKLYTALQQYFQNGEKKTVEDADMELTSRDEGERKMEKEELDVSVREEEVSCSGPLSQKQAEFFLSQQASLLKNDETKALTPASLQKELNNLLKFNPDFAEAHYLSYLNNLRVQDVFSSTHSLLHYFDRLILTGAESKSNGEEGYGRSLRYAALNLAALHCRFGHYQQAELALQEAIRIAQESNDHVCLQHCLSWLYVLGQKRSDSYVLLEHSVKKAVHFGLPYLASLGIQSLVQQRAFAGKTANKLMDALKDSDLLHWKHSLSELIDISIAQKTAIWRLYGRSTMALQQAQMLLSMNSLEAVNAGVQQNNTESFAVALCHLAELHAEQGCFAAASEVLKHLKERFPPNSQHAQLWMLCDQKIQFDRAMNDGKYHLADSLVTGITALNSIEGVYRKAVVLQAQNQMSEAHKLLQKLLVHCQKLKNTEMVISVLLSVAELYWRSSSPTIALPMLLQALALSKEYRLQYLASETVLNLAFAQLILGIPEQALSLLHMAIEPILADGAILDKGRAMFLVAKCQVASAASYDQPKKAEALEAAIENLNEAKNYFAKVDCKERIRDVVYFQARLYHTLGKTQERNRCAMLFRQLHQELPSHGVPLINHL

SEQ ID NO: 5408 - protein, 344 aa, Homo sapiens
MSALAARLLQPAHSCSLRLRPFHLAAVRNEAVVISGRKLAQQIKQEVRQEVEEWVASGNKRPHLSVILVGENPASHSYVLNKTRAAAVVGINSETIMKPASISEEELLNLINKLNNDDNVDGLLVQLPLPEHIDERRICNAVSPDKDVDGFHVINVGRMCLDQYSMLPATPWGVWEIIKRTGIPTLGKNVVVAGRSKNVGMPIAMLLHTDGAHERPGGDATVTISHRYTPKEQLKKHTILADIVISAAGIPNLITADMIKEGAAVIDVGINRVHDPVTAKPKLVGDVDFEGVRQKAGYITPVPGGVGPMTVAMLMKNTIIAAKKVLRLEEREVLKSKELGVATN

SEQ ID NO: 5409 - protein, 424 aa, Homo sapiens
MSDSKCDSQFYSVQVADSTFTVLKRYQQLKPIGSGAQGIVCAAFDTVLGINVAVKKLSRPFQNQTHAKRAYRELVLLKCVNHKNIISLLNVFTPQKTLEEFQDVYLVMELMDANLCQVIHMELDHERMSYLLYQMLCGIKHLHSAGIIHRDLKPSNIVVKSDCTLKILDFGLARTACTNFMMTPYVVTRYYRAPEVILGMGYKENVDIWSVGCIMGELVKGCVIFQGTDHIDQWNKVIEQLGTPSAEFMKKLQPTVRNYVENRPKYPGIKFEELFPDWIFPSESERDKIKTSQARDLLSKMLVIDPDKRISVDEALRHPYITVWYDPAEAEAPPPQIYDAQLEEREHAIEEWKELIYKEVMDWEERSKNGVVKDQPSDAAVSSNATPSQSSSINDISSMSTEQTLASDTDSSLDASTGPLEGCR

SEQ ID NO: 5410 - protein, 382 aa, Homo sapiens
MSDSKCDSQFYSVQVADSTFTVLKRYQQLKPIGSGAQGIVCAAFDTVLGINVAVKKLSRPFQNQTHAKRAYRELVLLKCVNHKNIISLLNVFTPQKTLEEFQDVYLVMELMDANLCQVIHMELDHERMSYLLYQMLCGIKHLHSAGIIHRDLKPSNIVVKSDCTLKILDFGLARTACTNFMMTPYVVTRYYRAPEVILGMGYKENVDIWSVGCIMGELVKGCVIFQGTDHIDQWNKVIEQLGTPSAEFMKKLQPTVRNYVENRPKYPGIKFEELFPDWIFPSESERDKIKTSQARDLLSKMLVIDPDKRISVDEALRHPYITVWYDPAEAEAPPPQIYDAQLEEREHAIEEWKELIYKEVMDWEERSKNGVVKDQPSAQMQQ

SEQ ID NO: 5411 - protein, 382 aa, Homo sapiens
MSDSKCDSQFYSVQVADSTFTVLKRYQQLKPIGSGAQGIVCAAFDTVLGINVAVKKLSRPFQNQTHAKRAYRELVLLKCVNHKNIISLLNVFTPQKTLEEFQDVYLVMELMDANLCQVIHMELDHERMSYLLYQMLCGIKHLHSAGIIHRDLKPSNIVVKSDCTLKILDFGLARTACTNFMMTPYVVTRYYRAPEVILGMGYKENVDIWSVGCIMAEMVLHKVLFPGRDYIDQWNKVIEQLGTPSAEFMKKLQPTVRNYVENRPKYPGIKFEELFPDWIFPSESERDKIKTSQARDLLSKMLVIDPDKRISVDEALRHPYITVWYDPAEAEAPPPQIYDAQLEEREHAIEEWKELIYKEVMDWEERSKNGVVKDQPSAQMQQ

SEQ ID NO: 5412 - protein, 424 aa, Homo sapiens
MSDSKCDSQFYSVQVADSTFTVLKRYQQLKPIGSGAQGIVCAAFDTVLGINVAVKKLSRPFQNQTHAKRAYRELVLLKCVNHKNIISLLNVFTPQKTLEEFQDVYLVMELMDANLCQVIHMELDHERMSYLLYQMLCGIKHLHSAGIIHRDLKPSNIVVKSDCTLKILDFGLARTACTNFMMTPYVVTRYYRAPEVILGMGYKENVDIWSVGCIMAEMVLHKVLFPGRDYIDQWNKVIEQLGTPSAEFMKKLQPTVRNYVENRPKYPGIKFEELFPDWIFPSESERDKIKTSQARDLLSKMLVIDPDKRISVDEALRHPYITVWYDPAEAEAPPPQIYDAQLEEREHAIEEWKELIYKEVMDWEERSKNGVVKDQPSDAAVSSNATPSQSSSINDISSMSTEQTLASDTDSSLDASTGPLEGCR

SEQ ID NO: 5413 - protein, 149 aa, Homo sapiens [sequence omitted]

SEQ ID NO: 5414 - protein, 703 aa, Homo sapiens
MTAVGRRCPALGSRGAAGEPEAGSDYVKFSKEKYILDSSPEKLHKELEEELKLSSTDLRSHAWYHGRIPREVSETLVQRNGDFLIRDSLTSLGDYVLTCRWRNQALHFKINKVVVKAGESYTHIQYLFEQESFDHVPALVRYHVGSRKAVSEQSGAIIYCPVNRTFPLRYLEASYGLGQGSSKPASPVSPSGPKGSHMKRRSVTMTDGLTADKVTRSDGCPTSTSLPRPRDSIRSCALSMDQIPDLHSPMSPISESPSSPAYSTVTRVHAAPAAPSATALPASPVARCSSEPQLCPGSAPKTHGESDKGPHTSPSHTLGKASPSPSLSSYSDPDSGHYCQLQPPVRGSREWAATETSSQQARSYGERLKELSENGAPEGDWGKTFTVPIVEVTSSFNPATFQSLLIPRDNRPLEVGLLRKVKELLAEVDARTLARHVTKVDCLVARILGVTKEMQTLMGVRWGMELLTLPHGRQLRLDLLERFHTMSIMLAVDILGCTGSAEERAALLHKTIQLAAELRGTMGNMFSFAAVMGALDMAQISRLEQTWVTLRQRHTEGAILYEKKLKPFLKSLNEGKEGPPLSNTTFPHVLPLITLLECDSAPPEGPEPWGSTEHGVEVVLAHLEAARTVAHHGGLYHTNAEVKLQGFQARPELLEVFSTEFQMRLLWGSQGASSSQARRYEKFDKVLTALSHKLEPAVRSSEL

SEQ ID NO: 5415 - protein, 860 aa, Homo sapiens
MTEGTKKTSKKFKFFKFKGFGSLSNLPRSFTLRRSSASISRQSHLEPDTFEATQDDMVTVPKSPPAYARSSDMYSHMGTMPRPSIKKAQNSQAARQAQEAGPKPNLVPGGVPDPPGLEAAKEVMVKATGPLEDTPAMEPNPSAVEVDPIRKPEVPTGDVEEERPPRDVHSERAAGEPEAGSDYVKFSKEKYILDSSPEKLHKELEEELKLSSTDLRSHAWYHGRIPREVSETLVQRNGDFLIRDSLTSLGDYVLTCRWRNQALHFKINKVVVKAGESYTHIQYLFEQESFDHVPALVRYHVGSRKAVSEQSGAIIYCPVNRTFPLRYLEASYGLGQGSSKPASPVSPSGPKGSHMKRRSVTMTDGLTADKVTRSDGCPTSTSLPRPRDSIRSCALSMDQIPDLHSPMSPISESPSSPAYSTVTRVHAAPAAPSATALPASPVARRSSEPQLCPGSAPKTHGESDKGPHTSPSHTLGKASPSPSLSSYSDPDSGHYCQLQPPVRGSREWAATETSSQQARSYGERLKELSENGAPEGDWGKTFTVPIVEVTSSFNPATFQSLLIPRDNRPLEVGLLRKVKELLAEVDARTLARHVTKVDCLVARILGVTKEMQTLMGVRWGMELLTLPHGRQLRLDLLERFHTMSIMLAVDILGCTGSAEERAALLHKTIQLAAELRGTMGNMFSFAAVMGALDMAQISRLEQTWVTLRQRHTEGAILYEKKLKPFLKSLNEGKEGPPLSNTTFPHVLPLITLLECDSAPPEGPEPWGSTEHGVEVVLAHLEAARTVAHHGGLYHTNAEVKLQGFQARPELLEVFSTEFQMRLLWGSQGASSSQARRYEKFDKVLTALSHKLEPAVRSSEL

SEQ ID NO: 5416 - protein, 682 aa, Homo sapiens
MASPDRSKRKILKAKKTMPLSCRKQVEMLNKSRNVEALKTAIGSNVPSGNQSFSPSVITRTTEITKCSPSENGASSLDSNKNSISEKSKVFSQNCIKPVEEIVHSETKLEQVVCSYQKPSRTTESPSRVFTEEAKDSLNTSENDSEHQTNVTRSLFEHEGACSLKSSCCPPSVLSGVVQMPESTVTSTVGDKKTDQMVFHLETNSNSESHDKRQSDNILCSEDSGFVPVEKTPNLVNSVTSNNCADDILKTDECSRTSISNCESADSTWQSSLDTNNNSHYQKKRMFSENEENVKRMKTSEQINENICVSLERQTAFLEQVRHLIQQEIYSINYELFDKKLKELNQRIGKTECRNKHEGIADKLLAKIAKLQRRIKTVLLFQRNCLKPNMLSSNGASKVANSEAMILDKNLESVNSPIEKSSVNYEPSNPSEKGSKKINLSSDQNKSVSESNNDDVMLISVESPNLTTPITSNPTDTRKITSGNSSNSPNAEVMAVQKKLDSIIDLTKEGLSNCNTESPVSPLESHSKAASNSKETTPLAQNAVQVPESFEHLPPLPEPPAPLPELVDKTRDTLPPQKPELKVKRVFRPNGIALTWNITKINPKCAPVESYHLFLCHENSNNKLIWKKIGEIKALPLPMACTLSQFLASNRYYFTVQSKDIFGRYGPFCDIKSIPGFSENLT

SEQ ID NO: 5417 - protein, 348 aa, Homo sapiens [sequence omitted]

SEQ ID NO: 5418 - protein, 392 aa, Homo sapiens
MDLFGDLPEPERSPRPAAGKEAQKGPLLFDDLPPASSTDSGSGGPLLFDDLPPASSGDSGSLATSISQMVKTEGKGAKRKTSEEEKNGSEELVEKKVCKASSVIFGLKGYVAERKGEREEMQDAHVILNDITEECRPPSSLITRVSYFAVFDGHGGIRASKFAAQNLHQNLIRKFPKGDVISVEKTVKRCLLDTFKHTDEEFLKQASSQKPAWKDGSTATCVLAVDNILYIANLGDSRAILCRYNEESQKHAALSLSKEHNPTQYEERMRIQKAGGNVRDGRVLGVLEVSRSIGDGQYKRCGVTSVPDIRRCQLTPNDRFILLACDGLFKVFTPEEAVNFILSCLEDEKIQTREGKSAADARYEAACNRLANKAVQRGSADNVTVMVVRIGH

SEQ ID NO: 5419 - protein, 99 aa, Homo sapiens
MDLFGDLPEPERSPRPAAGKEAQKGPLLFDDLPPASSTDSGTVFRLSQVCVNVSTHPGIVVVSIFFPFPHFQHTDVLGVGLSLSFESMASGKAEKSASR

SEQ ID NO: 5420 - protein, 1044 aa, Homo sapiens
MPPGVDCPMEFWTKEENQSVVVDFLLPTGVYLNFPVSRNANLSTIKQLLWHRAQYEPLFHMLSGPEAYVFTCINQTAEQQELEDEQRRLCDVQPFLPVLRLVAREGDRVKKLINSQISLLIGKGLHEFDSLCDPEVNDFRAKMCQFCEEAAARRQQLGWEAWLQYSFPLQLEPSAQTWGPGTLRLPNRALLVNVKFEGSEESFTFQVSTKDVPLALMACALRKKATVFRQPLVEQPEDYTLQVNGRHEYLYGNYPLCQFQYICSCLHSGLTPHLTMVHSSSILAMRDEQSNPAPQVQKPRAKPPPIPAKKPSSVSLWSLEQPFRIELIQGSKVNADERMKLVVQAGLFHGNEMLCKTVSSSEVSVCSEPVWKQRLEFDINICDLPRMARLCFALYAVIEKAKKARSTKKKSKKADCPIAWANLMLFDYKDQLKTGERCLYMWPSVPDEKGELLNPTGTVRSNPNTDSAAALLICLPEVAPHPVYYPALEKILELGRHSECVHVTEEEQLQLREILERRGSGELYEHEKDLVWKLRHEVQEHFPEALARLLLVTKWNKHEDVAQMLYLLCSWPELPVLSALELLDFSFPDCHVGSFAIKSLRKLTDDELFQYLLQLVQVLKYESYLDCELTKFLLDRALANRKIGHFLFWHLRSEMHVPSVALRFGLILEAYCRGSTHHMKVLMKQGEALSKLKALNDFVKLSSQKTPKPQTKELMHLCMRQEAYLEALSHLQSPLDPSTLLAEVCVEQCTFMDSKMKPLWIMYSNEEAGSGGSVGIIFKNGDDLRQDMLTLQMIQLMDVLWKQEGLDLRMTPYGCLPTGDRTGLIEVVLRSDTIANIQLNKSNMAATAAFNKDALLNWLKSKNPGEALDRAIEEFTLSCAGYCVATYVLGIGDRHSDNIMIRESGQLFHIDFGHFLGNFKTKFGINRERVPFILTYDFVHVIQQGKTNNSEKFERFRGYCERAYTILRRHGLLFLHLFALMRAAGLPELSCSKDIQYLKDSLALGKTEEEALKHFRVKFNEALRESWKTKVNWLAHNVSKDNRQ

SEQ ID NO: 5421 - protein, 1347 aa, Homo sapiens
MAEPRRVAFISLSPVRRREAEYPGPEREPEYPREPPRLEPQPYREPARAEPPAPREPAPRSDAQPPSREKPLPQREVSRAEPPMSLQREPPRPEPPPPFPPLPLQPPPPRESASRAEQPPRPPRETVRLELVLKDPTDESCVEFSYPELLLCGEQRKKLIHTEDPFNDEHQERQEVEMLAKKFEMKYGGKPRKHRKDRLQDLIDIGFGYDETDPFIDNSEAYDELVPASLTTKYGGFYINTGTLQFRQASDTEEDDITDNQKHKPPKVPKIKEDDIEMKKRKRKEEGEKEKKPRKKVPKQLGVVALNSHKSEKKKKRYKDSLSLAAMIRKFQKEKDALKKESNPKVPVTLSTPSLNKPPCAAAALGNDVPDLNLSSGDPDLPIFVSTNEHELFQEAENALEMLDDFDFDRLLDAASDGSPLSESGGENGTTTQPTYTSQVMPKVVPTLPEGLPVLLEKRIEDLRVAAKLFDEEGRKKFFTQDMNNILLDIELQLQELGPVIRSGVYSHLEAFVPCNKETLVKRLKKLHLNVQDDRLREPLQKLKLAVSNVMPEQLFKYQEDCQARSQAKCAKLQTDEEREKNGSEEDDDEKPGKRVIGPRKKFHWDDTIRTLLCNLVEIKLGCYELEPNKSQSAEDYLKSFMETEVKPLWPKGWMQARMLFKESRSVHNHLTSAPAKKKVIPAPKPKVKEVMVKTLPLHSFPTMLKECSPKKDQKTPTSLVASVSGPPTSSSTAAIAAASSSSAPAQETICLDDSLDEDLSFHSPSLDLVSEALAVINNGNKGPPVGSRISMPTTKPRPGLREEKLASIMSKLPLATPKKLDSTQTTHSSSLIAGHTGPVPKKPQDLAHTGISSGLIAGSSIQNPKVSLEPLPARLLQQGLQRSSQIHTSSSSQTHVSSSSQAQIAASSHALGTSEAQDASSLTQVTKVHQHSAVQQNYVSPLQATISKSQTNPVVKLSNNPQLSCSSSLIKTSDKPLMYRLPLSTPSPGNGSQGSHPLVSRTVPSTTTSSNYLAKAMVSQISTQGFKSPFSMAASPKLAASPKPATSPKPLPSPKPSASPKPSLSAKPSVSTKLISKSNPTPKPTVSPSSSSPNALVAQGSHSSTNSPVHKQPSGMNISRQSPTLNLLPSSRTSGLPPTKNLQAPSKLTNSSSTGTVGKNSLSGIAMNVPASRGSNLNSSGANRTSLSGGTGSGTQGATKPLSTPHRPSTASGSSVVTASVQSTAGASLLANASPLTLMTSPLSVTNQNVTPFGMLGGLVPVTMPFQFPLEIFGFGTDTAGVTTTSGSTSAAFHHSLTQNLLKGLQPGGAQHAATLSHSPLPAHLQQAFHDGGQSKGDTKLPRKSQ

SEQ ID NO: 5422 - protein, 1347 aa, Homo sapiens; identical to SEQ ID NO: 5421

SEQ ID NO: 5423 - protein, 1347 aa, Homo sapiens; identical to SEQ ID NO: 5421

SEQ ID NO: 5424 - protein, 667 aa, Homo sapiens
MHHQQRMAALGTDKELSDLLDFSAMFSPPVSSGKNGPTSLASGHFTGSNVEDRSSSGSWGNGGHPSPSRNYGDGTPYDHMTSRDLGSHDNLSPPFVNSRIQSKTERGSYSSYGRESNLQGCHQQSLLGGDMDMGNPGTLSPTKPGSQYYQYSSNNPRRRPLHSSAMEVQTKKVRKVPPGLPSSVYAPSASTADYNRDSPGYPSSKPATSTFPSSFFMQDGHHSSDPWSSSSGMNQPGYAGMLGNSSHIPQSSSYCSLHPHERLSYPSHSSADINSSLPPMSTFHRSGTNHYSTSSCTPPANGTDSIMANRGSGAAGSSQTGDALGKALASIYSPDHTNNSFSSNPSTPVGSPPSLSAGTAVWSRNGGQASSSPNYEGPLHSLQSRIEDRLERLDDAIHVLRNHAVGPSTAMPGGHGDMHGIIGPSHNGAMGGLGSGYGTGLLSANRHSLMVGTHREDGVALRGSHSLLPNQVPVPQLPVQSATSPDLNPPQDPYRGMPPGLQGQSVSSGSSEIKSDDEGDENLQDTKSSEDKKLDDDKKDIKSITSNNDDEDLTPEQKAEREKERRMANNARERLRVRDINEAFKELGRMVQLHLKSDKPQTKLLILHQAVAVILSLEQQVRERNLNPKAACLKRREEEKVSSEPPPLSLAGPHPGMGDASNHMGQM

SEQ ID NO: 5425 - protein, 608 aa, Homo sapiens
MGSVTVRYFCYGCLFTSATWTVLLFVYFNFSEVTQPLKNVPVKGSGPHGPSPKKFYPRFTRGPSRVLEPQFKANKIDDVIDSRVEDPEEGHLKFSSELGMIFNERDQELRDLGYQKHAFNMLISDRLGYHRDVPDTRNAACKEKFYPPDLPAASVVICFYNEAFSALLRTVHSVIDRTPAHLLHEIILVDDDSDFDDLKGELDEYVQKYLPGKIKVIRNTKREGLIRGRMIGAAHATGEVLVFLDSHCEVNVMWLQPLLAAIREDRHTVVCPVIDIISADTLAYSSSPVVRGGFNWGLHFKWDLVPLSELGRAEGATAPIKSPTMAGGLFAMNRQYFHELGQYDSGMDIWGGENLEISFRIWMCGGKLFIIPCSRVGHIFRKRRPYGSPEGQDTMTHNSLRLAHVWLDEYKEQYFSLRPDLKTKSYGNISERVELRKKLGCKSFKWYLDNVYPEMQISGSHAKPQQPIFVNRGPKRPKVLQRGRLYHLQTNKCLVAQGRPSQKGGLVVLKACDYSDPNQIWIYNEEHELVLNSLLCLDMSETRSSDPPRLVKCHGSGGSQQWTFGKNNRLYQVSVGLCLRAVDPLGQKGSVAMAICDGSSSQQWHLEG

SEQ ID NO: 5426 - protein, 379 aa, Homo sapiens
MTLQPRCEDVETAEGVALTVTGVAQVKIMTEKELLAVACEQFLGKNVQDIKNVVLQTLEGHLRSILGTLTVEQIYQDRDQFAKLVREVAAPDVGRMGIEILSFTIKDVYDKVDYLSSLGKTQTAVVQRDADIGVAEAERDAGIREAECKKEMLDVKFMADTKIADSKRAFELQKSAFSEEVNIKTAEAQLAYELQGAREQQKIRQEEIEIEVVQRKKQIAVEAQEILRTDKELIATVRRPAEAEAHRIQQIAEGEKVKQVLLAQAEAEKIRKIGEAEAAVIEAMGKAEAERMKLKAEAYQKYGDAAKMALVLEALPQIAAKIAAPLTKVDEIVVLSGDNSKVTSEVNRLLAELPASVHALTGVDLSKIPLIKKATGVQV

SEQ ID NO: 5427 - protein, 467 aa, Homo sapiens
MLLLLLLPLLWGRERVEGQKSNRKDYSLTMQSSVTVQEGMCVHVRCSFSYPVDSQTDSDPVHGYWFRAGNDISWKAPVATNNPAWAVQEETRDRFHLLGDPQTKNCTLSIRDARMSDAGRYFFRMEKGNIKWNYKYDQLSVNVTALTHRPNILIPGTLESGCFQNLTCSVPWACEQGTPPMISWMGTSVSPLHPSTTRSSVLTLIPQPQHHGTSLTCQVTLPGAGVTTNRTIQLNVSYPPQNLTVTVFQGEGTASTALGNSSSLSVLEGQSLRLVCAVDSNPPARLSWTWRSLTLYPSQPSNPLVLELQVHLGDEGEFTCRAQNSLGSQHVSLNLSLQQEYTGKMRPVSGVLLGAVGGAGATALVFLSFCVIFIVVRSCRKKSARPAADVGDIGMKDANTIRGSASQGNLTESWADDNPRHHGLAAHSSGEEREIQYAPLSFHKGEPQDLSGQEATNNEYSEIKIPK

SEQ ID NO: 5428 - protein, 316 aa, Homo sapiens
MLLLLLLPLLWGRERVEGQKSNRKDYSLTMQSSVTVQEGMCAHVRCSFSYPVDSQTDSDPVHGYWFRAGNDISWKAPVATNNPAWAVQEETRDRFHLLGDPQTKNCTLSIRDARMSDAGRYFFRMEKGNIKWNYKYDQLSVNVTDPPQNLTVTVFQGEGTASTALGNSSSLSVLEGQSLRLVCAVDSNPPARLSWTWRSLTLYPSQPSNPLVLELQVHLGDEGEFTCRAQNSLGSQHVSLNLSLQQEYTGKMRPVSGVLLGAVGGAGATALVFLSFCVIFIVVRSCRKKSARPAADVGDIGMKDANTIRGSALRVT

SEQ ID NO: 5429 - protein, 203 aa, Homo sapiens
MGSRDHLFKVLVVGDAAVGKTSLVQRYSQDSFSKHYKSTVGVDFALKVLQWSDYEIVRLQLWDIAGQERFTSMTRLYYRDASACVIMFDVTNATTFSNSQRWKQDLDSKLTLPNGEPVPCLLLANKCDLSPWAVSRDQIDRFSKENGFTGWTETSVKENKNINEAMRVLIEKMMRNSTEDIMSLSTQGDYINLQTKSSSWSCC

SEQ ID NO: 5430 - protein, 208 aa, Homo sapiens
MAQETNHSQVPMLCSTGCGFYGNPRTNGMCSVCYKEHLQRQNSSNGRISPPATSVSSLSESLPVQCTDGSVPEAQSALDSTSSSMQPSPVSNQSLLSESVASSQLDSTSVDKAVPETEDVQASVSDTAQQPSEEQSKSLEKPKQKKNRCFMCRKKVGLTGFECRCGNVYCGVHRYSDVHNCSYNYKADAAEKIRKENPVVVGEKIQKI

SEQ ID NO: 5431 - protein, 512 aa, Homo sapiens
MHTPDFAGPDDARAVDIMDICESILERKRHDSERSTCSILEQTDMEAVEALVCMSSWGQRSQKGDLLRIRPLTPVSDSGDVTTTVHMDAATPELPKDFHSLSTLCITPPQSPDLVEPSTRTPVSPQVTDSKACTATDVLQSSAVVARALSGGAERGLLGLEPVPSSPCRAKGTSVIRHTGESPAACFPTIQTPDCRLSDSREGEEQLLGHFETLQDTHLTDSLLSTNLVSCQPCLHKSGGLLLTDKGQQAGWPGAVQTCSPKNYENDLPRKTTPLISVSVPAPPVLCQMIPVTGQSSMLPAFLKPPPQLSVGTVRPILAQAAPAPQPVFVGPAVPQGAVMLVLPQGALPPPAPCAANVMAAGNTKLLPLAPAPVFITSSQNCVPQVDFSRRRNYVCSFPGCRKTYFKSSHLKAHLRTHTGEKPFNCSWDGCDKKFARSDELSRHRRTHTGEKKFVCPVCDRRFMRSDHLTKHARRHMTTKKIPGWQAEVGKLNRIASAESPGSPLVSMPASA

SEQ ID NO: 5432 - protein, 1087 aa, Homo sapiens
MMTSVGTNRARGNWEQPQNQNQTQHKQRPQATAEQIRLAQMISDHNDADFEEKVKQLIDITGKNQDECVIALHDCNGDVNRAINVLLEGNPDTHSWEMVGKKKGVSGQKDGGQTESNEEGKENRDRDRDYSRRRGGPPRRGRGASRGREFRGQENGLDGTKSGGPSGRGTERGRRGRGRGRGGSGRRGGRFSAQGMGTFNPADYAEPANTDDNYGNSSGNTWNNTGHFEPDDGTSAWRTATEEWGTEDWNEDLSETKIFTASNVSSVPLPAENVTITAGQRIDLAVLLGKTPSTMENDSSNLDPSQAPSLAQPLVFSNSKQTAISQPASGNTFSHHSMVSMLGKGFGDVGEAKGGSTTGSQFLEQFKTAQALAQLAAQHSQSGSTTTSSWDMGSTTQSPSLVQYDLKNPSDSAVHSPFTKRQAFTPSSTMMEVFLQEKSPAVATSTAAPPPPSSPLPSKSTSAPQMSPGSSDNQSSSPQPAHQKLKQQKKKASLTSKIPALAVEMPGSADISGLNLQFGALQFGSEPVLSDYESTPTTSASSSQAPSSLYTSTASESSSTISSNQSQESGYQSGPIQSTTYTSQNNAQGPLYEQRSTQTRRYPSSISSSPQKDLTQAKNGFSSVQATQLQTTQSVEGATGSAVKSDSPSTSSIPPLNETVSAASLLTTTNQHSSSLGGLSHSEEIPNTTTTQHSSTLSTQQNTLSSSTSSGRTSTSTLLHTSVESEANLHSSSSTFSTTSSTVSAPPPVVSVSSSLNSGSSLGLSLGSNSTVTASTRSSVATTSGKAPPNLPPGVPPLLPNPYIMAPGLLHAYPPQVYGYDDLQMLQTRFPLDYYSIPFPTPTTPLTGRDGSLASNPYSGDLTKFGRGDASSPAPATTLAQPQQNQTQTHHTTQQTFLNPALPPGYSYTSLPYYTGVPGLPSTFQYGPAVFPVAPTSSKQHGVNVSVNASATPFQQPSGYGSHGYNTGVSVTSSNTGVPDISGSVYSKTQQSFEKQGFHSGTPAASFNLPSALGSGGPINPATAAAYPPAPFMHILTPHQQPHSQILHHHLQQDGQTGSGQRSQTSSIPQKPQTNKSAYNSYSWGAN

SEQ ID NO: 5433 - protein, 673 aa, Homo sapiens
MSRTLASAVLLSSPDYYERLGQLQHGLRDSEKKRLDLEKKLYEYNQSDTCRVKLKYVKLKNYLKEICESEKKAHTRNQEYLKRFERVQAHVVHFTTNTEKLQKLKLEYETQIKKMLCSKDSLGLKEELTDEDREKVAVHEGINSGTAMSRGLYQPATIFMGRQMSAILSMRDFSTEHKSPQPTKNFSIPDPHSHRQTAQSSNVTDSCVVQTSNDTQCLNKSDNIDGKASLQIGEKMPVTASVLSEEEQTHCLEIGSNTRHGKSNLSEGKKSAELNSPLRERLSPENRTTDLKCDSSSGSEGEILTREHIEVEEKRASPPVSPIPVSEYCESENKWSQEKHSPWEGVSDHLAHREPKSQKPFRKMQEEEEESWSTSRDLTISISEDDLILESPEPQPNPGGKMEGEDGIEALKLIHAEQERVALSTEKNCILQTLSSPDSEKESSTNAPTREPGQTPDSDVPRAQVGQHVATLKEHDNSVKEEATALLRKALTEECGRRSAIHSSESSCSLPSILNDNSGIKEAKPAVWLNSVPTREQEVSSGCGDKSKKENVAADIPITETEAYQLLKKATLQDNTNQTENRFQKTDASVSHLSGLNIGSGAFETKTANKIASEASFSSSEGSPLSRHENKKKPVINSKSNALWDESDDSNSEIEAALRPRNHNTDDSDDFYD

SEQ ID NO: 5434 - protein, 282 aa, Homo sapiens
MAVPETRPNHTIYINNLNEKIKKDELKKSLYAIFSQFGQILDILVSRSLKMRGQAFVIFKEVSSATNALRSMQGFPFYDKPMRIQYAKTDSDIIAKMKGTFVERDRKREKRKPKSQETPATKKAVQGGGATPVVGAVQGPVPGMPPMTQAPRIMHHMPGQPPYMPPPGMIPPPGLAPGQIPPGAMPPQQLMPGQMPPAQPLSENPPNHILFLTNLPEETNELMLSMLFNQFPGFKEVRLVPGRHDIAFVEFDNEVQAGAARDALQGFKITQNNAMKISFAKK

SEQ ID NO: 5435 - protein, 360 aa, Homo sapiens
MNPTDIADTTLDESIYSNYYLYESIPKPCTKEGIKAFGELFLPPLYSLVFVFGLLGNSVVVLVLFKYKRLRSMTDVYLLNLAISDLLFVFSLPFWGYYAADQWVFGLGLCKMISWMYLVGFYSGIFFVMLMSIDRYLAIVHAVFSLRARTLTYGVITSLATWSVAVFASLPGFLFSTCYTERNHTYCKTKYSLNSTTWKVLSSLEINILGLVIPLGIMLFCYSMIIRTLQHCKNEKKNKAVKMIFAVVVLFLGFWTPYNIVLFLETLVELEVLQDCTFERYLDYAIQATETLAFVHCCLNPIIYFFLGEKFRKYILQLFKTCRGLFVLCQYCGLLQIYSADTPSSSYTQSTMDHDLHDAL

SEQ ID NO: 5436 - protein, 1923 aa, Homo sapiens
MENSHPPHHHHQQPPPQPGPSGERRNHHWRSYKLMIDPALKKGHHKLYRYDGQHFSLAMSSNRPVEIVEDPRVVGIWTKNKELELSVPKFKIDEFYVGPVPPKQVTFAKLNDNIRENFLRDMCKKYGEVEEVEILYNPKTKKHLGIAKVVFATVRGAKDAVQHLHSTSVMGNIIHVELDTKGETRMRFYELLVTGRYTPQTLPVGELDAVSPIVNETLQLSDALKRLKDGGLSAGCGSGSSSVTPNSGGTPFSQDTAYSSCRLDTPNSYGQGTPLTPRLGTPFSQDSSYSSRQPTPSYLFSQDPAVTFKARRHESKFTDAYNRRHEHHYVHNSPAVTAVAGATAAFRGSSDLPFGAVGGTGGSSGPPFKAQPQDSATFAHTPPPAQATPAPGFKSAFSPYQTPVAHFPPPPEEPTATAAFGARDSGEFRRAPAPPPLPPAEPLAKEKPGTPPGPPPPDTNSMELGGRPTFGWSPEPCDSPGTPTLESSPAGPEKPHDSLDSRIEMLLKEQRTKLLFLREPDSDTELQMEGSPISSSSSQLSPLAPFGTNSQPGFRGPTPPSSRPSSTGLEDISPTPLPDSDEDEELDLGLGPRPPPEPGPPDPAGLLSQTAEVALDLVGDRTPTSEKMDEGQQSSGEDMEISDDEMPSAPITSADCPKPMVVTPGAAAVAAPSVLAPTLPLPPPPGFPPLPPPPPPPPPQPGFPMPPPLPPPPPPPPPAHPAVTVPPPPLPAPPGVPPPPILPPLPPFPPGLFPVMQVDMSHVLGGQWGGMPMSFQMQTQVLSRLMTGQGACPYPPFMAAAAAAASAGLQFVNLPPYRGPFSLSNSGPGRGQHWPPLPKFDPSVPPPGYMPRQEDPHKATVDGVLLVVLKELKAIMKRDLNRKMVEVVAFRAFDEWWDKKERMAKASLTPVKSGEHKDEDRPKPKDRIASCLLESWGKGEGLGYEGLGLGIGLRGAIRLPSFKVKRKEPPDTTSSGDQKRLRPSTSVDEEDEESERERDRDMADTPCELAKRDPKGVGVRRRPARPLELDSGGEEDEKESLSEEQESTEEEEEAEEEEEEEDDDDDDSDDRDESENDDEDTALSEASEKDEGDSDEEETVSIVTSKAEATSSSESSESSEFESSSESSPSSSEDEEEVVAREEEEEEEEEEMVAEESMASAGPEDFEQDGEEAALAPGAPAVDSLGMEEEVDIETEAVAPEERPSMLDEPPLPVGVEEPADSREPPEEPGLSQEGAMLLSPEPPAKEVEARPPLSPERAPEHDLEVEPEPPMMLPLPLQPPLPPPRPPRPPSPPPEPETTDASHPSVPPEPLAEDHPPHTPGLCGSLAKSQSTETVPATPGGEPPLSGGSSGLSLSSPQVPGSPFSYPAPSPSLSSGGLPRTPGRDFSFTPTFSEPSGPLLLPVCPLPTGRRDERSGPLASPVLLETGLPLPLPLPLPLPLALPAVLRAQARAPTPLPPLLPAPLASCPPPMKRKPGRPRRSPPSMLSLDGPLVRPPAGAALGRELLLLPGQPQTPVFPSTHDPRTVTLDFRNAGIPAPPPPLPPQPPPPPPPPPVEPTKLPFKELDNQWPSEAIPPGPRGRDEVTEEYMELAKSRGPWRRPPKKRHEDLVPPAGSPELSPPQPLFRPRSEFEEMTILYDIWNGGIDEEDIRFLCVTYERLLQQDNGMDWLNDTLWVYHPSTSLSSAKKKKRDDGIREHVTGCARSEGFYTIDKKDKLRYLNSSRASTDEPPADTQGMSIPAQPHASTRAGSERRSEQRRLLSSFTGSCDSDLLKFNQLKFRKKKLKFCKSHIHDWGLFAMEPIAADEMVIEYVGQNIRQVIADMREKRYEDEGIGSSYMFRVDHDTIIDATKCGNFARFINHSCNPNCYAKVITVESQKKIVIYSKQHINVNEEITYDYKFPIEDVKIPCLCGSENCRGTLN

SEQ ID NO: 5437 - protein, 1923 aa, Homo sapiens; identical to SEQ ID NO: 5436

SEQ ID NO: 5438 - protein, 754 aa, Homo sapiens
MGIKVQRPRCFFDIAINNQPAGRVVFELFSDVCPKTCENFRCLCTGEKGTGKSTQKPLHYKSCLFHRVVKDFMVQGGDFSEGNGRGGESIYGGFFEDESFAVKHNKEFLLSMANRGKDTNGSQFFITTKPTPHLDGHHVVFGQVISGQEVVREIENQKTDAASKPFAEVRILSCGELIPKSKVKKEEKKRHKSSSSSSSSSSDSDSSSDSQSSSDSSDSESATEEKSKKRKKKHRKNSRKHKKEKKKRKKSKKSASSESEAENLEAQPQSTVRPEEIPPIPENRFLMRKSPPKADEKERKNRERERERECNPPNSQPASYQRRLLVTRSGRKIKGRGPRRYRTPSRSRSRDRFRRSETPPHWRQEMQRAQRMRVSSGERWIKGDKSELNEIKENQRSPVRVKERKITDHRNVSESPNRKNEKEKKVKDHKSNSKERDIRRNSEKDDKYKNKVKKRAKSKSRSKSKEKSKSKERDSKHNRNEEKRMRSRSKGRDHENVKEKEKQSDSKGKDQERSRSKEKSKQLESKSNEHDHSKSKEKDRRAQSRSRECDITKGKHSYNSRTRERSRSRDRSRRVRSRTHDRDRSRSKEYHRYREQEYRRRGRSRSRERRTPPGRSRSKDRRRRRRDSRSSEREESQSRNKDKYRNQESKSSHRKENSESEKRMYSKSRDHNSSNNSREKKADRDQSPFSKIKQSSQDNELKSSMLKNKEDEKIRSSVEKENQKSKGQENDHVHEKNKKFDHESSPGTDEDKSG

SEQ ID NO: 5439 - protein, 268 aa, Homo sapiens
MEMKKKINLELRNRSPEEVTELVLDNCLCVNGEIEGLNDTFKELEFLSMANVELSSLARLPSLNKLRKLELSDNIISGGLEVLAEKCPNLTYLNLSGNKIKDLSTVEALQNLKNLKSLDLFNCEITNLEDYRESIFELLQQITYLDGFDQEDNEAPDSEEEDDEDGDEDDEEEEENEAGPPEGYEEEEEEEEEEDEDEDEDEDEAGSELGEGEEEVGLSYLMKEEIQDEEDDDDYVEEGEEEEEEEEGGLRGEKRKRDAEDDGEEEDD

SEQ ID NO: 5440 - protein, 642 aa, Homo sapiens
MIPNGYLMFEDENFIESSVAKLNALRKSGQFCDVRLQVCGHEMLAHRAVLACCSPYLFEIFNSDSDPHGISHVKFDDLNPEAVEVLLNYAYTAQLKADKELVKDVYSAAKKLKMDRVKQVCGDYLLSRMDVTSCISYRNFASCMGDSRLLNKVDAYIQEHLLQISEEEEFLKLPRLKLEVMLEDNVCLPSNGKLYTKVINWVQRSIWENGDSLEELMEEVQTLYYSADHKLLDGNLLDGQAEVFGSDDDHIQFVQKKPPRENGHKQISSSSTGCLSSPNATVQSPKHEWKIVASEKTSNNTYLCLAVLDGIFCVIFLHGRNSPQSSPTSTPKLSKSLSFEMQQDELIEKPMSPMQYARSGLGTAEMNGKLIAAGGYNREECLRTVECYNPHTDHWSFLAPMRTPRARFQMAVLMGQLYVVGGSNGHSDDLSCGEMYDSNIDDWIPVPELRTNRCNAGVCALNGKLYIVGGSDPYGQKGLKNCDVFDPVTKLWTSCAPLNIRRHQSAVCELGGYLYIIGGAESWNCLNTVERYNPENNTWTLIAPMNVARRGAGVAVLNGKLFVCGGFDGSHAISCVEMYDPTRNEWKMMGNMTSPRSNAGIATVGNTIYAVGGFDGNEFLNTVEVYNLESNEWSPYTKIFQF

SEQ ID NO: 5441 - protein, 221 aa, Homo sapiens
MIPNGYLMFEDENFIESSVAKLNALRKSGQFCDVRLQVCGHEMLAHRAVLACCSPYLFEIFNSDSDPHGISHVKFDDLNPEAVEVLLNYAYTAQLKADKELVKDVYSAAKKLKMDRVKQVCGDYLLSRMDVTSCISYRNFASCMGDSRLLNKVDAYIQEHLLQISEEEEFLKLPRLKLEVMLEDNVCLPSNGKLYTKVINWVQRSIWENGDSLEELMEEVY

SEQ ID NO: 5442 - protein, 361 aa, Homo sapiens
MAQPGDPRRLCRLVQEGRLRALKEELQAAGGCPGPAGDTLLHCAARHGHRDVLAYLAEAWGMDIEATNRDYKRPLHEAASMGHRDCVRYLLGRGAAVDCLKKADWTPLMMACTRKNLGVIQELVEHGANPLLKNKDGWNSFHIASREGDPLILQYLLTVCPGAWKTESKIRRTPLHTAAMHGHLEAVKVLLKRCQYEPDYRDNCGVTALMDAIQCGHIDVARLLLDEHGACLSAEDSLGAQALHRAAVTGQDEAIRFLVSELGVDVDVRATSTHLTALHYAAKEGHTSTIQTLLSLGADINSKDEKNRSALHLACAGQHLACAKFLLQSGLKDSEDITGTLAQQLPRRADVLQGSGHSAMT

SEQ ID NO: 5443 - protein, 326 aa, Homo sapiens
MAQPGDPRRLCRLVQEGRLRALKEELQAAGGCPGPAGDTLLHCAARHGHRDVLAYLAEAWGMDIEATNRDYKRPLHEAASMGHRDCVRYLLGRGAAVDCLKKADWTPLMMACTRKNLGVIQELVEHGANPLLKNKDGWNSFHIASREGDPLILQYLLTVCPGAWKTESKIRRTPLHTAAMHGHLEAVKVLLKRCQYEPDYRDNCGVTALMDAIQCGHIDVARLLLDEHGACLSAEDSLGAQALHRAAVTGHTSTIQTLLSLGADINSKDEKNRSALHLACAGQHLACAKFLLQSGLKDSEDITGTLAQQLPRRADVLQGSGHSAMT

SEQ ID NO: 5444 - protein, 304 aa, Homo sapiens
MAQPGDPRRLCRLVQEGRLRALKEELQAAGGCPGPAGDTLLHCAARHGHRDVLAYLAEAWGMDIEATNRDYKRPLHEAASMGHRDCVRYLLGRGAAVDCLKKADWTPLMMACTRKNLGVIQELVEHGANPLLKNKDGWNSFHIASREGDPLILQYLLTVCPGAWKTESKIRRTPLHTAAMHGHLEAVKVLLKRCQYEPDYRDNCGVTALMDAIQCGHIDVARLLLDEHGACLSAEDSLGAQALHRAAVTGQDEAIRFLVSELGVDVDVRATSTHLTALHYAAKPCIWPVQVSTWPVPSFSCSRD

SEQ ID NO: 5445 - protein, 361 aa, Homo sapiens; identical to SEQ ID NO: 5442

SEQ ID NO: 5446 - protein, 654 aa, Homo sapiens
MAAVALRDSAQGMTFEDVAIYFSQEEWELLDESQRFLYCDVMLENFAHVTSLGYCHGMENEAIASEQSVSIQVRTSKGNTPTQKTHLSEIKMCVPVLKDILPAAEHQTTSPVQKSYLGSTSMRGFCFSADLHQHQKHYNEEEPWKRKVDEATFVTGCRFHVLNYFTCGEAFPAPTDLLQHEATPSGEEPHSSSSKHIQAFFNAKSYYKWGEYRKASSHKHTLVQHQSVCSEGGLYECSKCEKAFTCKNTLVQHQQIHTGQKMFECSECEESFSKKCHLILHKIIHTGERPYECSDREKAFIHKSEFIHHQRRHTGGVRHECGECRKTFSYKSNLIEHQRVHTGERPYECGECGKSFRQSSSLFRHQRVHSGERPYQCCECGKSFRQIFNLIRHRRVHTGEMPYQCSDCGKSFSCKSELIQHQRIHSGERPYECRECGKSFRQFSNLIRHRSIHTGDRPYECSECEKSFSRKFILIQHQRVHTGERPYECSECGKSFTRKSDLIQHRRIHTGTRPYECSECGKSFRQRSGLIQHRRLHTGERPYECSECGKSFSQSASLIQHQRVHTGERPYECSECGKSFSQSSSLIQHQRGHTGERPYECSQCGKPFTHKSDLIQHQRVHTGERPYECSECGKSFSRKSNLIRHRRVHTEERP

SEQ ID NO: 5447 - protein, 453 aa, Homo sapiens
MKLLVILLFSGLITGFRSDSSSSLPPKLLLVSFDGFRADYLKNYEFPHLQNFIKEGVLVEHVKNVFITKTFPNHYSIVTGLYEESHGIVANSMYDAVTKKHFSDSNDKDPFWWNEAVPIWVTNQLQENRSSAAAMWPGTDVPIHDTISSYFMNYNSSVSFEERLNNITMWLNNSNPPVTFATLYWEEPDASGHKYGPEDKENMSRVLKKIDDLIGDLVQRLKMLGLWENLNVIITSDHGMTQCSQDRLINLDSCIDHSYYTLIDLSPVAAILPKINRTEVYNKLKNCSPHMNVYLKEDIPNRFYYQHNDRIQPIILVADEGWTIVLNESSQKLGDHGYDNSLPSMHPFLAAHGPAFHKGYKHSTINIVDIYPMMCHILGLKPHPNNGTFGHTKCLLVDQWCINLPEAIAIVIGSLLVLTMLTCLIIIMQNRLSVPRPFSRLQLQEDDDDPLIG

SEQ ID NO: 5448 - protein, 1191 aa, Homo sapiens
MPGTPGSLEMGLLTFRDVAIEFSPEEWQCLDTAQQNLYRNVMLENYRNLAFLGIALSKPDLITYLEQGKEPWNMKQHEMVDEPTGICPHFPQDFWPEQSMEDSFQKVLLRKYEKCGHENLQLRKGCKSVDECKVHKEGYNKLNQCLTTAQSKVFQCGKYLKVFYKFLNSNRHTIRHTGKKCFKCKKCVKSFCIRLHKTQHKCVYITEKSCKCKECEKTFHWSSTLTNHKEIHTEDKPYKCEECGKAFKQLSTLTTHKIICAKEKIYKCEECGKAFLWSSTLTRHKRIHTGEKPYKCEECGKAFSHSSTLAKHKRIHTGEKPYKCEECGKAFSHSSALAKHKRIHTGEKPYKCKECGKAFSNSSTLANHKITHTEEKPYKCKECDKTFKRLSTLTKHKIIHAGEKLYKCEECGKAFNRSSNLTIHKFIHTGEKPYKCEECGKAFNWSSSLTKHKRFHTREKPFKCKECGKGFIWSSTLTRHKRIHTGEKPYKCEECGKAFRQSSTLTKHKIIHTGEKPYKFEECGKAFRQSLTLNKHKIIHSREKPYKCKECGKAFKQFSTLTTHKIIHAGKKLYKCEECGKAFNHSSSLSTHKIIHTGEKSYKCEECGKAFLWSSTLRRHKRIHTGEKPYKCEECGKAFSHSSALAKHKRIHTGEKPYKCKECGKAFSNSSTLANHKITHTEEKPYKCKECDKTFKRLSTLTKHKIIHAGEKLYKCEECGKAFNRSSNLTIHKFIHTGEKPYKCEECGKAFNWSSSLTKHKRIHTREKPFKCKECGKAFIWSSTLTRHKRIHTGEKPYKCEECGKAFSRSSTLTKHKTIHTGEKPYKCKECGKAFKHSSALAKHKIIHAGEKLYKCEECGKAFNQSSNLTTHKIIHTKEKPSKSEECDKAFIWSSTLTEHKRIHTREKPYKCEECGKAFSQPSHLTTHKRMHTGEKPYKCEECGKAFSQSSTLTTHKIIHTGEKPYKCEECGKAFRKSSTLTEHKIIHTGEKPYKCEECGKAFSQSSTLTRHTRMHTGEKPYKCEECGKAFNRSSKLTTHKIIHTGEKPYKCEECGKAFISSSTLNGHKRIHTREKPYKCEECGKAFSQSSTLTRHKRLHTGEKPYKCGECGKAFKESSALTKHKIIHTGEKPYKCEKCCKAFNQSSILTNHKKIHTITPVIPLLWEAEAGGSRGQEMETILANTVKPLLY

SEQ ID NO: 5449 - protein, 488 aa, Homo sapiens
MAGKGSSGRRPLLLGLLVAVATVHLVICPYTKVEESFNLQATHDLLYHWQDLEQYDHLEFPGVVPRTFLGPVVIAVFSSPAVYVLSLLEMSKFYSQLIVRGVLGLGVIFGLWTLQKEVRRHFGAMVATMFCWVTAMQFHLMFYCTRTLPNVLALPVVLLALAAWLRHEWARFIWLSAFAIIVFRVELCLFLGLLLLLALGNRKVSVVRALRHAVPAGILCLGLTVAVDSYFWRQLTWPEGKVLWYNTVLNKSSNWGTSPLLWYFYSALPRGLGCSLLFIPLGLVDRRTHAPTVLALGFMALYSLLPHKELRFIIYAFPMLNITAARGCSYLLNNYKKSWLYKAGSLLVIGHLVVNAAYSATALYVSHFNYPGGVAMQRLHQLVPPQTDVLLHIDVAAAQTGVSRFLQVNSAWRYDKREDVQPGTGMLAYTHILMEAAPGLLALYRDTHRVLASVVGTTGVSLNLTQLPPFNVHLQTKLVLLERLPRPS

SEQ ID NO: 5450 - protein, 858 aa, Homo sapiens
MFTLAEVASLNDIQPTYRILKPWWDVFMDYLAVVMLMVAIFAGTMQLTKDQVVCLPVLPSPVNSKAHTPPGNAEVTTNIPKMEAATNQDQDGRTTNDISFGTSAVTPDIPLRATYPRTDFALPNQEAKKEKKDPTGRKTNLDFQQYVFINQMCYHLALPWYSKYFPYLALIHTIILMVSSNFWFKYPKTCSKVEHFVSILGKCFESPWTTKALSETACEDSEENKQRITGAQTLPKHVSTSSDEGSPSASTPMINKTGFKFSAEKPVIEVPSMTILDKKDGEQAKALFEKVRKFRAHVEDSDLIYKLYVVQTVIKTAKFIFILCYTANFVNAISFEHVCKPKVEHLIGYEVFECTHNMAYMLKKLLISYISIICVYGFICLYTLFWLFRIPLKEYSFEKVREESSFSDIPDVKNDFAFLLHMVDQYDQLYSKRFGVFLSEVSENKLREISLNHEWTFEKLRQHISRNAQDKQELHLFMLSGVPDAVFDLTDLDVLKLELIPEAKIPAKISQMTNLQELHLCHCPAKVEQTAFSFLRDHLRCLHVKFTDVAEIPAWVYLLKNLRELYLIGNLNSENNKMIGLESLRELRHLKILHVKSNLTKVPSNITDVAPHLTKLVIHNDGTKLLVLNSLKKMMNVAELELQNCELERIPHAIFSLSNLQELDLKSNNIRTIEEIISFQHLKRLTCLKLWHNKIVTIPPSITHVKNLESLYFSNNKLESLPVAVFSLQKLRCLDVSYNNISMIPIEIGLLQNLQHLHITGNKVDILPKQLFKCIKLRTLNLGQNCITSLPEKVGQLSQLTQLELKGNCLDRLPAQLGQCRMLKKSGLVVEDHLFDTLPLEVKEALNQDINIPFANGI

SEQ ID NO: 5451 - protein, 1487 aa, Homo sapiens
MVKLDIHTLAHHLKQERLYVNSEKQLIQRLNADVLKTAEKLYRTAWIAKQQRINLDRLIITSAEASPAECCQHAKILEDTQFVDGYKQLGFQETAYGEFLSRLRENPRLIASSLVAGEKLNQENTQSVIYTVFTSLYGNCIMQEDESYLLQVLRYLIEFELKESDNPRRLLRRGTCAFSILFKLFSEGLFSAKLFLTATLHEPIMQLLVEDEDHLETDPNKLIERFSPSQQEKLFGEKGSDRFRQKVQEMVESNEAKLVALVNKFIGYLKQNTYCFPHSLRWIVSQMYKTLSCVDRLEVGEVRAMCTDLLLACFICPAVVNPEQYGIISDAPINEVARFNLMQVGRLLQQLAMTGSEEGDPRTKSSLGKFDKSCVAAFLDVVIGGRAVETPPLSSVNLLEGLSRTVVYITYSQLITLVNFMKSVMSGDQLREDRMALDNLLANLPPAKPGKSSSLEMTPYNTPQLSPATTPANKKNRLPIATRSRSRTNMLMDLHMDHEGSSQETIQEVQPEEVLVISLGTGPQLTPGMMSENEVLNMQLSDGGQGDVPVDENKLHGKPDKTLRFSLCSDNLEGISEGPSNRSNSVSSLDLEGESVSELGAGPSGSNGVEALQLLEHEQATTQDNLDDKLRKFEIRDMMGLTDDRDISETVSETWSTDVLGSDFDPNIDEDRLQEIAGAAAENMLGSLLCLPGSGSVLLDPCTGSTISETTSEAWSVEVLPSDSEAPDLKQEERLQELESCSGLGSTSDDTDVREVSSRPSTPGLSVVSGISATSEDIPNKIEDLRSECSSDFGGKDSVTSPDMDEITHDFLYILQPKQHFQHIEAEADMRIQLSSSAHQLTSPPSQSESLLAMFDPLSSHEGASAVVRPKVHYARPSHPPPDPPILEGAVGGNEARLPNFGSHVLTPAEMEAFKQRHSYPERLVRSRSSDIVSSVRRPMSDPSWNRRPGNEERELPPAAAIGATSLVAAPHSSSSSPSKDSSRGETEERKDSDDEKSDRNRPWWRKRFVSAMPKAPIPFRKKEKQEKDKDDLGPDRFSTLTDDPSPRLSAQAQVAEDILDKYRNAIKRTSPSDGAMANYESTEVMGDGESAHDSPRDEALQNISADDLPDSASQAAHPQDSAFSYRDAKKKLRLALCSADSVAFPVLTHSTRNGLPDHTDPEDNEIVCFLKVQIAEAINLQDKNLMAQLQETMRCVCRFDNRTCRKLLASIAEDYRKRAPYIAYLTRCRQGLQTTQAHLERLLQRVLRDKEVANRYFTTVCVRLLLESKEKKIREFIQDFQKLTAADDKTAQVEDFLQFLYGAMAQDVIWQNASEEQLQDAQLAIERSVMNRIFKLAFYPNQDGDILRDQVLHEHIQRLSKVVTANHRALQIPEVYLREAPWPSAQSEIRTISAYKTPRDKVQCILRMCSTIMNLLSLANEDSVPGADDFVPVLVFVLIKANPPCLLSTVQYISSFYASCLSGEESYWWMQFTAAVEFIKTIDDRK

SEQ ID NO: 5452 - protein, 1469 aa, Homo sapiens
MDVDAEREKITQEIKELERILDPGSSGSHVEISESSLESDSEADSLPSEDLDPADPPISEEERWGEASNDEDDPKDKTLPEDPETCLQLNMVYQEVIQEKLAEANLLLAQNREQQEELMRDLAGSKGTKVKDGKSLPPSTYMGHFMKPYFKDKVTGVGPPANEDTREKAAQGIKAFEELLVTKWKNWEKALLRKSVVSDRLQRLLQPKLLKLEYLHQKQSKVSSELERQALEKQGREAEKEIQDINQLPEEALLGNRLDSHDWEKISNINFEGSRSAEEIRKFWQNSEHPSINKQEWSREEEERLQAIAAAHGHLEWQKIAEELGTSRSAFQCLQKFQQHNKALKRKEWTEEEDRMLTQLVQEMRVGSHIPYRRIVYYMEGRDSMQLIYRWTKSLDPGLKKGYWAPEEDAKLLQAVAKYGEQDWFKIREEVPGRSDAQCRDRYLRRLHFSLKKGRWNLKEEEQLIELIEKYGVGHWAKIASELPHRSGSQCLSKWKIMMGKKQGLRRRRRRARHSVRWSSTSSSGSSSGSSGGSSSSSSSSSEEDEPEQAQAGEGDRALLSPQYMVPDMDLWVPARQSTSQPWRGGAGAWLGGPAASLSPPKGSSASQGGSKEASTTAAAPGEETSPVQVPARAHGPVPRSAQASHSADTRPAGAEKQALEGGRRLLTVPVETVLRVLRANTAARSCTQKEQLRQPPLPTSSPGVSSGDSVARSHVQWLRHRATQSGQRRWRHALHRRLLNRRLLLAVTPWVGDVVVPCTQASQRPAVVQTQADGLREQLQQARLASTPVFTLFTQLFHIDTAGCLEVVRERKALPPRLPQAGARDPPVHLLQASSSAQSTPGHLFPNVPAQEASKSASHKGSRRLASSRVERTLPQASLLASTGPRPKPKTVSELLQEKRLQEARAREATRGPVVLPSQLLVSSSVILQPPLPHTPHGRPAPGPTVLNVPLSGPGAPAAAKPGTSGSWQEAGTSAKDKRLSTMQALPLAPVFSEAEGTAPAASQAPALGPGQISVSCPESGLGQSQAPAASRKQGLPEAPPFLPGAPSPTPLPVQPLSLTHIGGPHVATSVPLPVTWVLTAQGLLPVPVPAVVSLPRPAGTPGPAGLLATLLPPLTETRAAQGPRAPALSSSWQPPANMNREPEPSCRTDTPAPPTHALSQSPAEADGSVAFVPGEAQVAREIPEPRTSSHADPPEAEPPWSGRLPAFGGVIPATEPRGTPGSPSGTQEPRGPLGLEKLPLRQPGPEKGALDLEKPPLPQPGPEKGALDLGLLSQEGEAATQQWLGGQRGVRVPLLGSRLPYQPPALCSLRALSGLLLHKKALEHKATSLVVGGEAERPAGALQASLGLVRGQLQDNPAYLLLRARFLAAFTLPALLATLAPQGVRTTLSVPSRVGSESEDEDLLSELELADRDGQPGCTTATCPIQGAPDSGKCSASSCLDTSNDPDDLDVLRTRHARHTRKRRRLV

SEQ ID NO: 5453 - protein, 563 aa, Homo sapiens
MLEEAGEVLENMLKASCLPLGFIVFLPAVLLLVAPPLPAADAAHEFTVYRMQQYDLQGQPYGTRNAVLNTEARTMAAEVLSRRCVLMRLLDFSYEQYQKALRQSAGAVVIILPRAMAAVPQDVVRQFMEIEPEMLAMETAVPVYFAVEDEALLSIYKQTQAASASQGSASAAEVLLRTATANGFQMVTSGVQSKAVSDWLIASVEGRLTGLGGEDLPTIVIVAHYDAFGVAPWLSLGADSNGSGVSVLLELARLFSRLYTYKRTHAAYNLLFFASGGGKFNYQGTKRWLEDNLDHTDSSLLQDNVAFVLCLDTVGRGSSLHLHVSKPPREGTLQHAFLRELETVAAHQFPEVRFSMVHKRINLAEDVLAWEHERFAIRRLPAFTLSHLESHRDGQRSSIMDVRSRVDSKTLTRNTRIIAEALTRVIYNLTEKGTPPDMPVFTEQMQIQQEQLDSVMDWLTNQPRAAQLVDKDSTFLSTLEHHLSRYLKDVKQHHVKADKRDPEFVFYDQLKQVMNAYRVKPAVFDLLLAVGIAAYLGMAYVAVQHFSLLYKTVQRLLVKAKTQ

SEQ ID NO: 5454 - protein, 210 aa, Homo sapiens
MSGRSVRAETRSRAKDDIKRVMAAIEKVRKWEKKWVTVGDTSLRIYKWVPVTEPKVDDKNKNKKKGKDEKCGSEVTTPENSSSPGMMDMHDDNSNQSSIADASPIKQENSSNSSPAPEPNSAVPSDGTEAKVDEAQADGKEHPGAEDASDEQNSQSSMEHSMNSSEKVDRQPSGDSGLAAETSAISQDLEGVPPSKKMKLEASQQNSEEM

SEQ ID NO: 5455 - protein, 231 aa, Homo sapiens
MSGRSVRAETRSRAKDDIKRVMAAIEKVRKWEKKWVTVGDTSLRIYKWVPVTEPKVDDKNKNKKKGKDEKCGSEVTTPENSSSPGMMDMHDDNSNQSSIADASPIKQENSSNSSPAPEPNSAVPSDGTEAKVDEAQADGKEHPGAEDASDEQNSQSSMEHSMNSSEKVDRQPSGDSGLAAETSAISQVPRSRSQRGSQIGREPIGLSGDLEGVPPSKKMKLEASQQNSEEM

SEQ ID NO: 5456 - protein, 184 aa, Homo sapiens
MASPAASSVRPPRPKKEPQTLVIPKNAAEEQKLKLERLMKNPDKAVPIPEKMSEWAPRPPPEFVRDVMGSSAGAGSGEFHVYRHLRRREYQRQDYMDAMAEKQKLDAEFQKRLEKNKIAAEEQTAKRRKKRQKLKEKKLLAKKMKLEQKKQEGPGQPKEQGSSSSAEASGTEEEEEVPSFTMGR

SEQ ID NO: 5457 - protein, 963 aa, Homo sapiens
MAVAPRLFGGLCFRFRDQNPEVAVEGRLPISHSCVGCRRERTAMATVAANPAAAAAAVAAAAAVTEDREPQHEELPGLDSQWRQIENGESGRERPLRAGESWFLVEKHWYKQWEAYVQGGDQDSSTFPGCINNATLFQDEINWRLKEGLVEGEDYVLLPAAAWHYLVSWYGLEHGQPPIERKVIELPNIQKVEVYPVELLLVRHNDLGKSHTVQFSHTDSIGLVLRTARERFLVEPQEDTRLWAKNSEGSLDRLYDTHITVLDAALETGQLIIMETRKKDGTWPSAQLHVMNNNMSEEDEDFKGQPGICGLTNLGNTCFMNSALQCLSNVPQLTEYFLNNCYLEELNFRNPLGMKGEIAEAYADLVKQAWSGHHRSIVPHVFKNKVGHFASQFLGYQQHDSQELLSFLLDGLHEDLNRVKKKEYVELCDAAGRPDQEVAQEAWQNHKRRNDSVIVDTFHGLFKSTLVCPDCGNVSVTFDPFCYLSVPLPISHKRVLEVFFIPMDPRRKPEQHRLVVPKKGKISDLCVALSKHTGISPERMMVADVFSHRFYKLYQLEEPLSSILDRDDIFVYEVSGRIEAIEGSREDIVVPVYLRERTPARDYNNSYYGLMLFGHPLLVSVPRDRFTWEGLYNVLMYRLSRYVTKPNSDDEDDGDEKEDDEEDKDDVPGPSTGGSLRDPEPEQAGPSSGVTNRCPFLLDNCLGTSQWPPRRRRKQLFTLQTVNSNGTSDRTTSPEEVHAQPYIAIDWEPEMKKRYYDEVEAEGYVKHDCVGYVMKKAPVRLQECIELFTTVETLEKENPWYCPSCKQHQLATKKLDLWMLPEILIIHLKRFSYTKFSREKLDTLVEFPIRDLDFSEFVIQPQNESNPELYKYDLIAVSNHYGGMRDGHYTTFACNKDSGQWHYFDDNSVSPVNENQIESKAAYVLFYQRQDVARRLLSPAGSSGAPASPACSSPPSSEFMDVN

SEQ ID NO: 5458 - protein, 621 aa, Homo sapiens
MSGCGLFLRTTAAARACRGLVVSTANRRLLRTSPPVRAFAKELFLGKIKKKEVFPFPEVSQDELNEINQFLGPVEKFFTEEVDSRKIDQEGKIPDETLEKLKSLGLFGLQVPEEYGGLGFSNTMYSRLGEIISMDGSITVTLAAHQAIGLKGIILAGTEEQKAKYLPKLASGEHIAAFCLTEPASGSDAASIRSRATLSEDKKHYILNGSKVWITNGGLANIFTVFAKTEVVDSDGSVKDKITAFIVERDFGGVTNGKPEDKLGIRGSNTCEVHFENTKIPVENILGEVGDGFKVAMNILNSGRFSMGSVVAGLLKRLIEMTAEYACTRKQFNKRLSEFGLIQEKFALMAQKAYVMESMTYLTAGMLDQPGFPDCSIEAAMVKVFSSEAAWQCVSEALQILGGLGYTRDYPYERILRDTRILLIFEGTNEILRMYIALTGLQHAGRILTTRIHELKQAKVSTVMDTVGRRLRDSLGRTVDLGLTGNHGVVHPSLADSANKFEENTYCFGRTVETLLLRFGKTIMEEQLVLKRVANILINLYGMTAVLSRASRSIRIGLRNHDHEVLLANTFCVEAYLQNLFSLSQLDKYAPENLDEQIKKVSQQILEKRAYICAHPLDRTC

SEQ ID NO: 5459 - protein, 228 aa, Homo sapiens
MTMGDKKSPTRPKRQAKPATDEGFWDCSVCTFRNSAEAFKCSICDVRKGTSTRKPRINSQLVAQQVAQQYATPPPPKKEKKEKVEKQDKEKPEKDKEISPSVTKKNTNKKTKPKSDILKDPPSEANSIQSANATTKTSETNHTSRPRLKNVDRSTAQQLAVTVGNVTVIITDFKEKTRSSSTSSSTVTSSAGSEQQNQSSSGSESTDKGSSRSSTPKGDMSAVNDESF

SEQ ID NO: 5460 - protein, 204 aa, Homo sapiens
MAGNFDSEERSSWYWGRLSRQEAVALLQGQRHGVFLVRDSSTSPGDYVLSVSENSRVSHYIINSSGPRPPVPPSPAQPPPGVSPSRLRIGDQEFDSLPALLEFYKIHYLDTTTLIEPVSRSRQGSGVILRQEEAEYVRALFDFNGNDEEDLPFKKGDILRIRDKPEEQWWNAEDSEGKRGMIPVPYVEKYRPASASVSALIGGR

SEQ ID NO: 5461 - protein, 304 aa, Homo sapiens
MAGNFDSEERSSWYWGRLSRQEAVALLQGQRHGVFLVRDSSTSPGDYVLSVSENSRVSHYIINSSGPRPPVPPSPAQPPPGVSPSRLRIGDQEFDSLPALLEFYKIHYLDTTTLIEPVSRSRQGSGVILRQEEAEYVRALFDFNGNDEEDLPFKKGDILRIRDKPEEQWWNAEDSEGKRGMIPVPYVEKYRPASASVSALIGGNQEGSHPQPLGGPEPGPYAQPSVNTPLPNLQNGPIYARVIQKRVPNAYDKTALALEVGELVKVTKINVSGQWEGECNGKRGHFPFTHVRLLDQQNPDEDFS

SEQ ID NO: 5462 - protein, 615 aa, Homo sapiens
MVSGPLALRWCAWAGRGDMGPDMELPSHSKQLLLQLNQQRTKGFLCDVIIMVENSIFRAHKNVLAASSIYFKSLVLHDNLINLDTDMVSSTVFQQILDFIYTGKLLPSDQPAEPNFSTLLTAASYLQLPELAALCRRKLKRAGKPFGSGRAGSTGMGRPPRSQRLSTASVIQARYQGLVDGRKGAHAPQELPQAKGSDDELFLGGSNQDSVQGLGRAVCPAGGEAGLGGCSSSTNGSSGGCEQELGLDLSKKSPPLPPATPGPHLTPDDAAQLSDSQHGSPPAASAPPVANSASYSELGGTPDEPMDLEGAEDNHLSLLEAPGGQPRKSLRHSTRKKEWGKKEPVAGSPFERREAGPKGPCPGEEGEGVGDRVPNGILASGAGPSGPYGEPPYPCKEEEENGKDASEDSAQSGSEGGSGHSSAHYMYRQEGYETVSYGDNLYVCIPCAKGFPSSEQLNAHVETHTEEELFIKEEGAYETGSGGAEEEAEDLSAPSAAYTAEPRPFKCSVCEKTYKDPATLRQHEKTHWLTRPFPCNICGKMFTQRGTMTRHMRSHLGLKPFACDECGMRFTRQYRLTEHMRVHSGEKPYECQLCGGKFTQQRNLISHLRMHTSPS

SEQ ID NO: 5463 - protein, 567 aa, Homo sapiens
MHGRLKVKTSEEQAEAKRLEREQKLKLYQSATQAVFQKRQAGELDESVLELTSQILGANPDFATLWNCRREVLQQLETQKSPEELAALVKAELGFLESCLRVNPKSYGTWHHRCWLLGRLPEPNWTRELELCARFLEVDERNFHCWDYRRFVATQAAVPPAEELAFTDSLITRNFSNYSSWHYRSCLLPQLHPQPDSGPQGRLPEDVLLKELELVQNAFFTDPNDQSAWFYHRWLLGRADPQDALRCLHVSRDEACLTVSFSRPLLVGSRMEILLLMVDDSPLIVEWRTPDGRNRPSHVWLCDLPAASLNDQLPQHTFRVIWTAGDVQKECVLLKGRQEGWCRDSTTDEQLFRCELSVEKSTVLQSELESCKELQELEPENKWCLLTIILLMRALDPLLYEKETLQYFQTLKAVDPMRATYLDDLRSKFLLENSVLKMEYAEVRVLHLAHKDLTVLCHLEQLLLVTHLDLSHNRLRTLPPALAALRCLEVLQASDNAIESLDGVTNLPRLQELLLCNNRLQQPAVLQPLASCPRLVLLNLQGNPLCQAVGILEQLAELLPSVSSVLT

SEQ ID NO: 5464 - protein, 567 aa, Homo sapiens; identical to SEQ ID NO: 5463

SEQ ID NO: 5465 - protein, 505 aa, Homo sapiens
MSPWSWFLLQTLCLLPTGAASRRGAPGTANCELKPQQSELNSFLWTIKRDPPSYFFGTIHVPYTRVWDFIPDNSKEAFLQSSIVYFELDLTDPYTISALTSCQMLPQGENLQDVLPRDIYCRLKRHLEYVKLMMPLWMTPDQRGKGLYADYLFNAIAGNWERKRPVWVMLMVNSLTEVDIKSRGVPVLDLFLAQEAERLRKQTGAVEKVEEQCHPLNGLNFSQVIFALNQTLLQQESLRAGSLQIPYTTEDLIKHYNCGDLSSVILSHDSSQVPNFINATLPPQERITAQEIDSYLRRELIYKRNERIGKRVKALLEEFPDKGFFFAFGAGHFMGNNTVLDVLRREGYEVEHAPAGRPIHKGKSKKTSTRPTLSTIFAPKVPTLEVPAPEAVSSGHSTLPPLVSRPGSADTPSEAEQRFRKKRRRSQRRPRLRQFSDLWVRLEESDIVPQLQVPVLDRHISTELRLPRRGHSHHSQMVASSACLSLWTPVFWVLVLAFQTETPLL

SEQ ID NO: 5466 - protein, 233 aa, Homo sapiens
MSPWSWFLLQTLCLLPTGAASRRGAPGTANCELKPQQSELNSFLWTIKRDPPSYFFGTIHVPYTRVWDFIPDNSKEAFLQSSIVYFELDLTDPYTISALTSCQMLPQGENLQDVLPRDIYCRLKRHLEYVKLMMPLWMTPDQRGKGLYADYLFNAIAGNWERKRPVWVMLMVNSLTEVDIKSRGVPVLDLFLAQEAERLRKQTGAVEKVEEQCHPLNGLNFSQLHSSLENQEP

SEQ ID NO: 5467 - protein, 111 aa, Homo sapiens
MVIFALNQTLLQQESLRAGSLQIPYTTEDLIKHYNCGDLSSVILSHDSSQVPNFINATLPPQERITAQEIDSYLRRELIYKRNERIGKRVKALLEEFPDKGFFFAFGAASQ

SEQ ID NO: 5468 - protein, 338 aa, Homo sapiens
MSPWSWFLLQTLCLLPTGAASRRGAPGTANCELKPQQSELNSFLWTIKRDPPSYFFGTIHVPYTRVWDFIPDNSKEAFLQSSIVYFELDLTDPYTISALTSCQMLPQGENLQDVLPRDIYCRLKRHLEYVKLMMPLWMTPDQRGKGLYADYLFNAIAGNWERKRPVWVMLMVNSLTEVDIKSRGVPVLDLFLAQEAERLRKQTGAVEKVEEQCHPLNGLNFSQVIFALNQTLLQQESLRAGSLQIPYTTEDLIKHYNCGDLSSVILSHDSSQVPNFINATLPPQERITAQEIDSYLRRELIYKRNERIGKRVKALLEEFPDKGFFFAFGAGHFMGNNT

SEQ ID NO: 5469 - protein, 333 aa, Homo sapiens
MSPWSWFLLQTLCLLPTGAASRRGAPGTANCELKPQQSELNSFLWTIKRDPPSYFFGTIHVPYTRVWDFIPDNSKEAFLQSSIVYFELDLTDPYTISALTSCQMLPQGENLQDVLPRDIYCRLKRHLEYVKLMMPLWMTPDQRGKGLYADYLFNAIAGNWERKRPVWVMLMVNSLTEVDIKSRGVPVLDLFLAQEAERLRKQTGAVEKVEEQCHPLNGLNFSQVIFALNQTLLQQESLRAGSLQIPYTTEDLIKHYNCGDLSSVILSHDSSQVPNFINATLPPQERITAQEIDSYLRRELIYKRNERIGKRVKALLEEFPDKGFFFAFGAASQ

SEQ ID NO: 5470 - protein, 172 aa, Homo sapiens
MGNNTVLDVLRREGYEVEHAPAGRPIHKGKSKKTSTRPTLSTIFAPKVPTLEVPAPEAVSSGHSTLPPLVSRPGSADTPSEAEQRFRKKRRRSQRRPRLRQFSDLWVRLEESDIVPQLQVPVLDRHISTELRLPRRGHSHHSQMVASSACLSLWTPVFWVLVLAFQTETPLL

SEQ ID NO: 5471 - protein, 505 aa, Homo sapiens; identical to SEQ ID NO: 5465

SEQ ID NO: 5472 - protein, 233 aa, Homo sapiens; identical to SEQ ID NO: 5466

SEQ ID NO: 5473 - protein, 111 aa, Homo sapiens; identical to SEQ ID NO: 5467

SEQ ID NO: 5474 - protein, 338 aa, Homo sapiens; identical to SEQ ID NO: 5468

SEQ ID NO: 5475 - protein, 333 aa, Homo sapiens; identical to SEQ ID NO: 5469

SEQ ID NO: 5476 - protein, 172 aa, Homo sapiens; identical to SEQ ID NO: 5470

SEQ ID NO: 5477 - protein, 517 aa, Homo sapiens
MAALGPSSQNVTEYVVRVPKNTTKKYNIMAFNAADKVNFATWNQARLERDLSNKKIYQEEEMPESGAGSEFNRKLREEARRKKYGIVLKEFRPEDQPWLLRVNGKSGRKFKGIKKGGVTENTSYYIFTQCPDGAFEAFPVHNWYNFTPLARHRTLTAEEAEEEWERRNKVLNHFSIMQQRRLKDQDQDEDEEEKEKRGRRKASELRIHDLEDDLEMSSDASDASGEEGGRVPKAKKKAPLAKGGRKKKKKKGSDDEAFEDSDDGDFEGQEVDYMSDGSSSSQEEPESKAKAPQQEEGPKGVDEQSDSSEESEEEKPPEEDKEEEEEKKAPTPQEKKRRKDSSEESDSSEESDIDSEASSAFFMAKKKTPPKRERKPSGGSSRGNSRPGTPSAEGGSTSSTLRAAASKLEQGKRVSEMPAAKRLRLDTGPQSLSGKSTPQPPSGKTTPNSGDVQVTEDAVRRYLTRKPMTTKDLLKKFQTKKTGLSSEQTVNVLAQILKRLNPERKMINDKMHFSLKE

SEQ ID NO: 5478 - protein, 524 aa, Homo sapiens
MAAPEPARAAPPPPPPPPPPPGADRVVKAVPFPPTHRLTSEEVFDLDGIPRVDVLKNHLVKEGRVDEEIALRIINEGAAILRREKTMIEVEAPITVCGDIHGQFFDLMKLFEVGGSPANTRYLFLGDYVDRGYFSIECVLYLWVLKILYPSTLFLLRGNHECRHLTEYFTFKQECKIKYSERVYEACMEAFDSLPLAALLNQQFLCVHGGLSPEIHTLDDIRRLDRFKEPPAFGPMCDLLWSDPSEDFGNEKSQEHFSHNTVRGCSYFYNYPAVCEFLQNNNLLSIIRAHEAQDAGYRMYRKSQTTGFPSLITIFSAPNYLDVYNNKAAVLKYENNVMNIRQFNCSPHPYWLPNFMDVFTWSLPFVGEKVTEMLVNVLSICSDDELMTEGEDQFDGSAAARKEIIRNKIRAIGKMARVFSVLREESESVLTLKGLTPTGMLPSGVLAGGRQTLQSATVEAIEAEKAIRGFSPPHRICSFEEAKGLDRINERMPPRKDAVQQDGFNSLNTAHATENHGTGNHTAQ

SEQ ID NO: 5479 - protein, 968 aa, Homo sapiens
MDSTLTASEIRQRFIDFFKRNEHTYVHSSATIPLDDPTLLFANAGMNQFKPIFLNTIDPSHPMAKLSRAANTQKCIRAGGKQNDLDDVGKDVYHHTFFEMLGSWSFGDYFKELACKMALELLTQEFGIPIERLYVTYFGGDEAAGLEADLECKQIWQNLGLDDTKILPGNMKDNFWEMGDTGPCGPCSEIHYDRIGGRDAAHLVNQDDPNVLEIWNLVFIQYNREADGILKPLPKKSIDTGMGLERLVSVLQNKMSNYDTDLFVPYFEAIQKGTGARPYTGKVGAEDADGIDMAYRVLADHARTITVALADGGRPDNTGRGYVLRRILRRAVRYAHEKLNASRGFFATLVDVVVQSLGDAFPELKKDPDMVKDIINEEEVQFLKTLSRGRRILDRKIQSLGDSKTIPGDTAWLLYDTYGFPVDLTGLIAEEKGLVVDMDGFEEERKLAQLKSQGKGAGGEDLIMLDIYAIEELRARGLEVTDDSPKYNYHLDSSGSYVFENTVATVMALRREKMFVEEVSTGQECGVVLDKTCFYAEQGGQIYDEGYLVKVDDSSEDKTEFTVKNAQVRGGYVLHIGTIYGDLKVGDQVWLFIDEPRRRPIMSNHTATHILNFALRSVLGEADQKGSLVAPDRLRFDFTAKGAMSTQQIKKAEEIANEMIEAAKAVYTQDCPLAAAKAIQGLRAVFDETYPDPVRVVSIGVPVSELLDDPSGPAGSLTSVEFCGGTHLRNSSHAGAFVIVTEEAIAKGIRRIVAVTGAEAQKALRKAESLKKCLSVMEAKVKAQTAPNKDVQREIADLGEALATAVIPQWQKDELRETLKSLKKVMDDLDRASKADVQKRVLEKTKQFIDSNPNQPLVILEMESGASAKALNEALKLFKMHSPQTSAMLFTVDNEAGKITCLCQVPQNAANRGLKASEWVQQVSGLMDGKGGGKDVSAQATGKNVGCLQEALQLATSFAQLRLGDVKN

SEQ ID NO: 5480 - protein, 790 aa, Homo sapiens
MAEQVLPQALYLSNMRKAVKIRERTPEDIFKPTNGIIHHFKTMHRYTLEMFRTCQFCPQFREIIHKALIDRNIQATLESQKKLNWCREVRKLVALKTNGDGNCLMHATSQYMWGVQDTDLVLRKALFSTLKETDTRNFKFRWQLESLKSQEFVETGLCYDTRNWNDEWDNLIKMASTDTPMARSGLQYNSLEEIHIFVLCNILRRPIIVISDKMLRSLESGSNFAPLKVGGIYLPLHWPAQECYRYPIVLGYDSHHFVPLVTLKDSGPEIRAVPLVNRDRGRFEDLKVHFLTDPENEMKEKLLKEYLMVIEIPVQGWDHGTTHLINAAKLDEANLPKEINLVDDYFELVQHEYKKWQENSEQGRREGHAQNPMEPSVPQLSLMDVKCETPNCPFFMSVNTQPLCHECSERRQKNQNKLPKLNSKPGPEGLPGMALGASRGEAYEPLAWNPEESTGGPHSAPPTAPSPFLFSETTAMKCRSPGCPFTLNVQHNGFCERCHNARQLHASHAPDHTRHLDPGKCQACLQDVTRTFNGICSTCFKRTTAEASSSLSTSLPPSCHQRSKSDPSRLVRSPSPHSCHRAGNDAPAGCLSQAARTPGDRTGTSKCRKAGCVYFGTPENKGFCTLCFIEYRENKHFAAASGKVSPTASRFQNTIPCLGRECGTLGSTMFEGYCQKCFIEAQNQRFHEAKRTEEQLRSSQRRDVPRTTQSTSRPKCARASCKNILACRSEELCMECQHPNQRMGPGAHRGEPAPEDPPKQRCRAPACDHFGNAKCNGYCNECFQFKQMYG

SEQ ID NO: 5481 - protein, 467 aa, Homo sapiens
MRPQELPRLAFPLLLLLLLLLPPPPCPAHSATRFDPTWESLDARQLPAWFDQAKFGIFIHWGVFSVPSFGSEWFWWYWQKEKIPKYVEFMKDNYPPSFKYEDFGPLFTAKFFNANQWADIFQASGAKYIVLTSKHHEGFTLWGSEYSWNWNAIDEGPKRDIVKELEVAIRNRTDLRFGLYYSLFEWFHPLFLEDESSSFHKRQFPVSKTLPELYELVNNYQPEVLWSDGDGGAPDQYWNSTGFLAWLYNESPVRGTVVTNDRWGAGSICKHGGFYTCSDRYNPGHLLPHKWENCMTIDKLSWGYRREAGISDYLTIEELVKQLVETVSCGGNLLMNIGPTLDGTISVVFEERLRQMGSWLKVNGEAIYETHTWRSQNDTVTPDVWYTSKPKEKLVYAIFLKWPTSGQLFLGHPKAILGATEVKLLGHGQPLNWISLEQNGIMVELPQLTIHQMPCKWGWALALTNVI

SEQ ID NO: 5482 - protein, 597 aa, Homo sapiens
MEAEPPLYPMAGAAGPQGDEDLLGVPDGPEAPLDELVGAYPNYNEEEEERRYYRRKRLGVLKNVLAASAGGMLTYGVYLGLLQMQLILHYDETYREVKYGNMGLPDIDSKMLMGINVTPIAALLYTPVLIRFFGTKWMMFLAVGIYALFVSTNYWERYYTLVPSAVALGMAIVPLWASMGNYITRMAQKYHEYSHYKEQDGQGMKQRPPRGSHAPYLLVFQAIFYSFFHLSFACAQLPMIYFLNHYLYDLNHTLYNVQSCGTNSHGILSGFNKTVLRTLPRSGNLIVVESVLMAVAFLAMLLVLGLCGAAYRPTEEIDLRSVGWGNIFQLPFKHVRDYRLRHLVPFFIYSGFEVLFACTGIALGYGVCSVGLERLAYLLVAYSLGASAASLLGLLGLWLPRPVPLVAGAGVHLLLTFILFFWAPVPRVLQHSWILYVAAALWGVGSALNKTGLSTLLGILYEDKERQDFIFTIYHWWQAVAIFTVYLGSSLHMKAKLAVLLVTLVAAAVSYLRMEQKLRRGVAPRQPRIPRPQHKVRGYRYLEEDNSDESDAEGEHGDGAEEEAPPAGPRPGPEPAGLGRRPCPYEQAQGGDGPEEQ

SEQ ID NO: 5483 - protein, 963 aa, Homo sapiens
MAAHLKKRVYEEFTKVVQPQEEIATKKLRLTKPSKSAALHIDLCKATSPADALQYLLQFARKPVEAESVEGVVRILLEHYYKENDPSVRLKIASLLGLLSKTAGFSPDCIMDDAINILQNEKSHQVLAQLLDTLLAIGTKLPENQAIQMRLVDVACKHLTDTSHGVRNKCLQLLGNLGSLEKSVTKDAEGLAARDVQKIIGDYFSDQDPRVRTAAIKAMLQLHERGLKLHQTIYNQACKLLSDDYEQVRSAAVQLIWVVSQLYPESIVPIPSSNEEIRLVDDAFGKICHMVSDGSWVVRVQAAKLLGSMEQVSSHFLEQTLDKKLMSDLRRKRTAHERAKELYSSGEFSSGRKWGDDAPKEEVDTGAVNLIESGACGAFVHGLEDEMYEVRIAAVEALCMLAQSSPSFAEKCLDFLVDMFNDEIEEVRLQSIHTMRKISNNITLREDQLDTVLAVLEDSSRDIREALHELLCCTNVSTKEGIHLALVELLKNLTKYPTDRDSIWKCLKFLGSRHPTLVLPLVPELLSTHPFFDTAEPDMDDPAYIAVLVLIFNAAKTCPTMPALFSDHTFRHYAYLRDSLSHLVPALRLPGRKLVSSAVSPSIIPQEDPSQQFLQQSLERVYSLQHLDPQGAQELLEFTIRDLQRLGELQSELAGVADFSATYLRCQLLLIKALQEKLWNVAAPLYLKQSDLASAAAKQIMEETYKMEFMYSGVENKQVVIIHHMRLQAKALQLIVTARTTRGLDPLFGMCEKFLQEVDFFQRYFIADLPHLQDSFVDKLLDLMPRLMTSKPAEVVKILQTMLRQSAFLHLPLPEQIHKASATIIEPAGESDNPLRFTSGLVVALDVDATLEHVQDPQNTVKVQVLYPDGQAQMIHPKPADFRNPGPGRHRLITQVYLSHTAWTEACQVEVRLLLAYNSSARIPKCPWMEGGEMSPQVETSIEGTIPFSKPVKVYIMPKPARR

SEQ ID NO: 5484 - protein, 499 aa, Homo sapiens
MPAVAEALGQEGPPDLSRSAFLATVLTSLSAAFSSMPSSAYSLPFSRSLELDYHTSSCFRGTMVKADCPVPITDLPDSSGKLQYGCKNCGRAFCSGCLSFSAAVPRTGNTQQKVCKQCHEVLTRGSSANASKWSPPQNYKKRVAALEAKQKPSTSQSQGLTRQDQMIAERLARLRQENKPKLVPSQAEIEARLAALKDERQGSIPSTQEMEARLAALQGRVLPSQTPQPAHHTPDTRTQAQQTQDLLTQLAAEVAIDESWKGGGPAASLQNDLNQGGPGSTNSKRQANWSLEEEKSRLLAEAALELREENTRQERILALAKRLAMLRGQDPERVTLQDYRLPDSDDDEDEETAIQRVLQQLTEEASLDEASGFNIPAEQASRPWTQPRGAEPEAQDVDPRPEAEEEELPWCCICNEDATLRCAGCDGDLFCARCFREGHDAFELKEHQDICLLSSTCRPRALKTPWSSRKGSPTGSGTHFWAQPQDVRWESLSGSTDDG

SEQ ID NO: 5485 - protein, 474 aa, Homo sapiens
MNSVSPAAAQYRSSSPEDARRRPEARRPRGPRGPDPNGLGPSGASGPALGSPGAGPSEPDEVDKFKAKFLTAWNNVKYGWVVKSRTSFSKISSIHLCGRRYRFEGEGDIQRFQRDFVSRLWLTYRRDFPPLPGGCLTSDCGWGCMLRSGQMMLAQGLLLHFLPRDWTWAEGMGLGPPELSGSASPSRYHGPARWMPPRWAQGAPELEQERRHRQIVSWFADHPRAPFGLHRLVELGQSSGKKAGDWYGPSLVAHILRKAVESCSDVTRLVVYVSQDCTVYKADVARLVARPDPTAEWKSVVILVPVRLGGETLNPVYVPCVKELLRCELCLGIMGGKPRHSLYFIGYQDDFLLYLDPHYCQPTVDVSQADFPLESFHCTSPRKMAFAKMDPSCTVGFYAGDRKEFETLCSELTRVLSSSSATERYPMFTLAEGHAQDHSLDDLCSQLAQPTLRLPRTGRLLRAKRPSSEDFVFL

SEQ ID NO: 5486 - protein, 476 aa, Homo sapiens
MGPAPGQGLYRSPMPGAAYPRPGMLPGSRMTPQGPSMGPPGYGGNPSVRPGLAQSGMDQSRKRPAPQQIQQVQQQAVQNRNHNAKKKKMADKILPQRIRELVPESQAYMDLLAFERKLDQTIMRKRLDIQEALKRPIKQKRKLRIFISNTFNPAKSDAEDGEGTVASWELRVEGRLLEDSALSKYDATKQKRKFSSFFKSLVIELDKDLYGPDNHLVEWHRTATTQETDGFQVKRPGDVNVRCTVLLMLDYQPPQFKLDPRLARLLGIHTQTRPVIIQALWQYIKTHKLQDPHEREFVICDKYLQQIFESQRMKFSEIPQRLHALLMPPEPIIINHVISVDPNDQKKTACYDIDVEVDDTLKTQMNSFLLSTASQQEIATLDNKIHETIETINQLKTQREFMLSFARDPQGFINDWLQSQCRDLKTMTDVVGNPEEERRAEFYFQPWAQEAVCRYFYSKVQQRRQELEQALGIRNT

SEQ ID NO: 5487 - protein, 435 aa, Homo sapiens
MGPAPGQGLYRSPMPGAAYPRPGMLPGSRMTPQGPSMGPPGYGGNPSVRPGLAQSGMDQSRKRPAPQQIQQVQQQAVQNRNHNAKKKKMADKILPQRIRELVPESQAYMDLLAFERKLDQTIMRKRLDIQEALKRPIKQKRKLRIFISNTFNPAKSDAEDGEGTVASWELRVEGRLLEDSALSKYDATKQKRKFSSFFKSLVIELDKDLYGPDNHLVEWHRTATTQETDGFQVKRPGDVNVRCTVLLMLDYQPPQFKLDPRLARLLGIHTQTRPVIIQALWQYIKTHKLQDPHEREFVICDKYLQQIFESQRMKFSEIPQRLHALLMPPEPIIINHVISVDPNDQKKTACYDIDVEVDDTLKTQMNSFLLSTASQQEIATLDNKTMTDVVGNPEEERRAEFYFQPWAQEAVCRYFYSKVQQRRQELEQALGIRNT

SEQ ID NO: 5488 - protein, 1278 aa, Homo sapiens
MKAFQRNRSRLKKDYDDFRRQPDHDTFNRELWTTDEGEGDLGKDSPKGEISKSIDSTEPLDILEKDHFDSDDMKLSEIDFPMARSKLLKKELPSKDLPKTLLKTLKRQSKQTDYVDDSTKELSPRKKAKLSTNETTVENLESDVQIDCFSESKHTEPSFPESFASLDSVPVSTLQKGTKPIQALLAKNIGNKVTLTNQLPPSTGRNALAVEKPVLSPPEASPIKPALTCHTNTKGPLQMVYKMPCGQWLPIDLQNSSVKIQVQPMVDPKTGEKIMQQVLILPKNFVIQHKEGKAVAKEVPPLQQKGTEQHCSSFPQTTNINSSLASVFVNSPGTVSTQLPNTAFNKTITPLSNISSARPQPLSPVTSVSNLLTPSVKTSQSEAGKAKNAVSAATFSLPSASPTISSTGQPLSSTTTLNGSTNPGSSFNCFAQQTADSSEAKQELKTVCIRDSQSILVRTRGGNTGVVKVQTNPDQNSPNTVSSSSVFTFAPQLQAFLVPKSTTSSSAFSPVAGTTTTSSLSPFSQTPTSVSIPASFAPSMGKNLKLTLGHTTGSGDLGHVIDKTSHMPSSPLKSSICSSTLLPSTTSSSVSVISISAANFGQNNANIIHTPTKQQQVDYITKSYPVTRSEATAATNGDVISGTPVQKLMLVSAPSILSSGNGTAINMTPALTSTGVSAQKLVFINAPVPSGTSTPTLVAESLKQTLPPPLHKAYVKTPEQPQIVLIPSTVGTPIKINSSPAVSQIKDVKIGLNIGQAIVNTSGTVPAIPSINILQNVTPKGEDKSSKGYILPLSTSGNSVPVSSNFVSQNITPVNESVVSSARAVNVLSVTGANLSLGSFPVTSASASAGAQPPVLVSGNDTSSRIMPILSNRLCSSSLGNTVAISTVKTGHLASSVLISTTQPVVSPKCLTSALQIPVTVALPTPATTSPKIINTVPHSAAVPGATRSVSISKRQSRTSLQFHSPGISTTVPTNVNTNKPQTELSSLSTSPGKITNTSNFASLPNQQALVKTPSYSSAPGGTTIHTASAPSNVTSLVGSQFSEPCIQQKIVINTSTPLAPGTQIMINGTRFIVPPQGLGAGSHVLLISTNPKYGAPLVLNSGQGIQSTPIDNSAQKITLASNNSLSGQPLQHPLRSPTKFINSFGNASSIPTVHTSPQLINTTAKVPVPPPVPTVSLTSVIKSPATLLAKTSLVSAICPSNPPLPSSTSVFHLDPPVKKLLVSPEGAILNTINTPASKVSSLSPSLSQIVVSASRSPASVFPAFQSSGLEKPDRAAS

SEQ ID NO: 5489 - protein, 312 aa, Homo sapiens
MANNDAVLKRLEQKGAEADQIIEYLKQQVSLLKEKAILQATLREEKKLRVENAKLKKEIEELKQELIQAEIQNGVKQIPFPSGTPLHANSMVSENVIQSTAVTTVSSGTKEQIKGGTGDEKKAKEKIEKKGEKKEKKQQSIAGSADSKPIDVSRLDLRIGCIITARKHPDADSLYVEEVDVGEIAPRTVVSGLVNHVPLEQMQNRMVILLCNLKPAKMRGVLSQAMVMCASSPEKIEILAPPNGSVPGDRITFDAFPGEPDKELNPKKKIWEQIQPDLHTNDECVATYKGVPFEVKGKGVCRAQTMSNSGIK

SEQ ID NO: 5490 - protein, 249 aa, Homo sapiens
MFTSQQWKHLSNDFLKTQQEKRHSWFKASGTIKKFRAGLSIFSPIPKSPSFPIIQDSMLKGKLGVPELRVGRLMNRSISCTMKNPKVEVFGYPPSPQVSGHCKNIPTLEYGFLVQIMKYAEQRIPTLNEYCVVCDEQHVFQNGSMLKPAVCTRELCVFSFYTLGVMSGAAEEVATGAEVVDLLVAMCRAALESPRKSIIFEPYPSVVDPTDPKTLAFNPKKKNYERLQKALDSVMSIREMTQGCRNCIK

SEQ ID NO: 5491 - protein, 519 aa, Homo sapiens
MDIKGQFWNDDDSEGDNESEEFLYGVQGNCAADLYRHPQLDADIEAVKEIYSENSVSIREYGTIDDVDIDLHINISFLDEEVSTAWKVLRTEPIVLRLRFSLSQYLDGPEPSIEVFQPSNKEGFGLGLQLKKILGMFTSQQWKHLSNDFLKTQQEKRHSWFKASGTIKKFRAGLSIFSPIPKSPSFPIIQDSMLKGKLGVPELRVGRLMNRSISCTMKNPKVEVFGYPPSPQAGLLCPQHVGLPPPARTSPLVSGHCKNIPTLEYGFLVQIMKYAEQRIPTLNEYCVVCDEQHVFQNGSMLKPAVCTRELCVFSFYTLGVMSGAAEEVATGAEVVDLLVAMCRAALESPRKSIIFEPYPSVVDPTDPKTLAFNPKKKNYERLQKALDSVMSIREMTQGSYLEIKKQMDKLDPLAHPLLQWIISSNRSHIVKLPLSRQLKFMHTSHQFLLLSSPPAKEARFRTAKKLYGSTFAFHGSHIENWHSILRNGLVNASYTKLQEWEKDSTGCPPRMSWSRDTTG

SEQ ID NO: 5492 - protein, 1541 aa, Homo sapiens
MKDKQKKKKERTWAEAARLVLENYSDAPMTPKQILQVIEAEGLKEMRSGTSPLACLNAMLHSNSRGGEGLFYKLPGRISLFTLKKDALQWSRHPATVEGEEPEDTADVESCGSNEASTVSGENDVSLDETSSNASCSTESQSRPLSNPRDSYRASSQANKQKKKTGVMLPRVVLTPLKVNGAHVESASGFSGCHADGESGSPSSSSSGSLALGSAAIRGQAEVTQDPAPLLRGFRKPATGQMKRNRGEEIDFETPGSILVNTNLRALINSRTFHALPSHFQQQLLFLLPEVDRQVGTDGLLRLSSSALNNEFFTHAAQSWRERLADGEFTHEMQVRIRQEMEKEKKVEQWKEKFFEDYYGQKLGLTKEESLQQNVGQEEAEIKSGLCVPGESVRIQRGPATRQRDGHFKKRSRPDLRTRARRNLYKKQESEQAGVAKDAKSVASDVPLYKDGEAKTDPAGLSSPHLPGTSSAAPDLEGPEFPVESVASRIQAEPDNLARASASPDRIPSLPQETVDQEPKDQKRKSFEQAASASFPEKKPRLEDRQSFRNTIESVHTEKPQPTKEEPKVPPIRIQLSRIKPPWVVKGQPTYQICPRIIPTTESSCRGWTGARTLADIKARALQVRGARGHHCHREAATTAIGGGGGPGGGGGGATDEGGGRGSSSGDGGEACGHPEPRGGPSTPGKCTSDLQRTQLLPPYPLNGEHTQAGTAMSRARREDLPSLRKEESCLLQRATVGLTDGLGDASQLPVAPTGDQPCQALPLLSSQTSVAERLVEQPQLHPDVRTECESGTTSWESDDEEQGPTVPADNGPIPSLVGDDTLEKGTGQALDSHPTMKDPVNVTPSSTPESSPTDCLQNRAFDDELGLGGSCPPMRESDTRQENLKTKALVSNSSLHWIPIPSNDEVVKQPKPESREHIPSVEPQVGEEWEKAAPTPPALPGDLTAEEGLDPLDSLTSLWTVPSRGGSDSNGSYCQQVDIEKLKINGDSEALSPHGESTDTASDFEGHLTEDSSEADTREAAVTKGSSVDKDEKPNWNQSAPLSKVNGDMRLVTRTDGMVAPQSWVSRVCAVRQKIPDSLLLASTEYQPRAVCLSMPGSSVEATNPLVMQLLQGSLPLEKVLPPAHDDSMSESPQVPLTKDQSHGSLRMGSLHGLGKNSGMVDGSSPSSLRALKEPLLPDSCETGTGLARIEATQAPGAPQKNCKAVPSFDSLHPVTNPITSSRKLEEMDSKEQFSSFSCEDQKEVRAMSQDSNSNAAPGKSPGDLTTSRTPRFSSPNVISFGPEQTGRALGDQSNVTGQGKKLFGSGNVAATLQRPRPADPMPLPAEIPPVFPSGKLGPSTNSMSGGVQTPREDWAPKPHAFVGSVKNEKTFVGGPLKANAENRKATGHSPLELVGHLEGMPFVMDLPFWKLPREPGKGLSEPLEPSSLPSQLSIKQAFYGKLSKLQLSSTSFNYSSSSPTFPKGLAGSVVQLSHKANFGASHSASLSLQMFTDSSTVESISLQCACSLKAMIMCQGCGAFCHDDCIGPSKLCVLCLVVR

SEQ ID NO: 5493 - protein, 767 aa, Homo sapiens
MFAKLKKKIAEETAVAQRPGGATRIPRSVSKESVASMGADSGDDFASDGSSSREDLSSQLLRRNEQIRKLEARLSDYAEQVRNLQKIKEKLEIALEKHQDSSMRKFQEQNETFQANRAKMAEGLALALARKDQEWSEKMDQLEKEKNILTAQLQEMKNQSMNLFQRRDEMDELEGFQQQELSKIKHMLLKKEESLGKMEQELEARTRELSRTQEELMNSNQMSSDLSQKLEELQRHYSTLEEQRDHVIASKTGAESKITALEQKEQELQALIQQLSIDLQKVTAETQEKEDVITHLQEKVASLEKRLEQNLSGEEHVQELLKEKTLAEQNLEDTRQQLLAARSSQAKAINTLETRVRELEQTLQASEEQLQQSKGIVAAQETQIQELAAANQESSHVQQQALALEQQFLERTQALEAQIVALERTRAADQTTAEQGMRQLEQENAALKECRNEYERSLQNHQFELKKLKEEWSQREIVSVAMAQALEEVRKQREEFQQQAANLTAIIDEKEQNLREKTEVLLQKEQEILQLERGHNSALLQIHQLQAELEALRTLKAEEAAVVAEQEDLLRLRGPLQAEALSVNESHVTSRAMQDPVFQLPTAGRTPNGEVGAMDLTQLQKEKQDLEQQLLEKNKTIKQMQQRMLELRKTLQKELKIRPDNELFEVREKPGPEMANMAPSVTNNTDLTDAREINFEYLKHVVLKFMSCRESEAFHLIKAVSVLLNFSQEEENMLKETLEYKMSWFGSKPAPKGSIRPSISNPRIPWS

SEQ ID NO: 5494 - protein, 419 aa, Homo sapiens
MAASSLEQKLSRLEAKLKQENREARRRIDLNLDISPQRPRPTLQLPLANDGGSRSPSSESSPQHPTPPARPRHMLGLPSTLFTPRSMESIEIDQKLQEIMKQTGYLTIGGQRYQAEINDLENLGEMGSGTCGQVWKMRFRKTGHVIAVKQMRRSGNKEENKRILMDLDVVLKSHDCPYIVQCFGTFITNTDVFIAMELMGTCAEKLKKRMQGPIPERILGKMTVAIVKALYYLKEKHGVIHRDVKPSNILLDERGQIKLCDFGISGRLVDSKAKTRSAGCAAYMAPERIDPPDPTKPDYDIRADVWSLGISLVELATGQFPYKNCKTDFEVLTKVLQEEPPLLPGHMGFSGDFQSFVKDCLTKDHRKRPKYNKLLEHSFIKRYETLEVDVASWFKDVMAKTESPRTSGVLSQPHLPFFR

SEQ ID NO: 5495 - protein, 356 aa, Homo sapiens
MAATRSPTRARERERSGAPAAGSDQVHSWMLATSQALDTVWRMAKGFVMLAVSFLVAAICYFRRLHLYSGHKLKWWIGYLQRKFKRNLSVEAEVDLLSYCAREWKGETPRNKLMRKAYEELFWRHHIKCVRQVRRDNYDALRSVLFQIFSQGISFPSWMKEKDIVKLPEKLLFSQGCNWIQQYSFGPEKYTGSNVFGKLRKYVELLKTQWTEFNGIRDYHKRGSMCNTLFSDAILEYKLYEALKFIMLYQVTEVYEQMKTKKVIPSLFRLLFSRETSSDPLSFMMNHLNSVGDTCGLEQIDMFILGYSLEVKIKVFRLFKFNSRDFEVCYPEEPLRDWPEISLLTENDRHYHIPVF

SEQ ID NO: 5496 - protein, 1025 aa, Homo sapiens
MSNGYSTDENFRYLISCFRARVKMYIQVEPVLDYLTFLPAEVKEQIQRTVATSGNMQAVELLLSTLEKGVWHLGWTREFVEALRRTGSPLAARYMNPELTDLPSPSFENAHDEYLQLLNLLQPTLVDKLLVRDVLDKCMEEELLTIEDRNRIAAAENNGNESGVRELLKRIVQKENWFSAFLNVLRQTGNNELVQELTGSDCSESNAEIENLSQVDGPQVEEQLLSTTVQPNLEKEVWGMENNSSESSFADSSVVSESDTSLAEGSVSCLDESLGHNSNMGSDSGTMGSDSDEENVAARASPEPELQLRPYQMEVAQPALEGKNIIICLPTGSGKTRVAVYIAKDHLDKKKKASEPGKVIVLVNKVLLVEQLFRKEFQPFLKKWYRVIGLSGDTQLKISFPEVVKSCDIIISTAQILENSLLNLENGEDAGVQLSDFSLIIIDECHHTNKEAVYNNIMRHYLMQKLKNNRLKKENKPVIPLPQILGLTASPGVGGATKQAKAEEHILKLCANLDAFTIKTVKENLDQLKNQIQEPCKKFAIADATREDPFKEKLLEIMTRIQTYCQMSPMSDFGTQPYEQWAIQMEKKAAKEGNRKERVCAEHLRKYNEALQINDTIRMIDAYTHLETFYNEEKDKKFAVIEDDSDEGGDDEYCDGDEDEDDLKKPLKLDETDRFLMTLFFENNKMLKRLAENPEYENEKLTKLRNTIMEQYTRTEESARGIIFTKTRQSAYALSQWITENEKFAEVGVKAHHLIGAGHSSEFKPMTQNEQKEVISKFRTGKINLLIATTVAEEGLDIKECNIVIRYGLVTNEIAMVQARGRARADESTYVLVAHSGSGVIEHETVNDFREKMMYKAIHCVQNMKPEEYAHKILELQMQSIMEKKMKTKRNIAKHYKNNPSLITFLCKNCSVLACSGEDIHVIEKMHHVNMTPEFKELYIVRENKALQKKCADYQINGEIICKCGQAWGTMMVHKGLDLPCLKIRNFVVVFKNNSTKKQYKKWVELPITFPNLDYSECCLFSDED

SEQ ID NO: 5497 - protein, 1548 aa, Homo sapiens
MAEREVESGPRKRFEQKSGAVFDEIVENCGGIMDTEMSEDIDHNLTPTLDSMSYGMPNQTGSENSLLDEDDYFLNSGDLAGIPVVGSDNEDEQDFSSKDNLVSSIHTDDSLEVERRVTQHESDNENEIQIQNKLKKDFPKQFDQVSVFKSIRKDFSLVRENSKETFSGKEKNRDLTYEREKRLDKPHKDLDSRLKSSFFDKAANQVEETLHTHLPQTPETNFRDSSYPFANKESIGSELGNSFASNIRIKEEPLDDEYDKAMAPQQGLLDKIKDEPDNAQEYSHGQQQKTQEGELKISAVFSVSGSPLAPQLTTGFQPSLASSGMNKMLPSVPATAVRVSCSGCKKILQKGQTAYQRKGSTQLFCSTLCLTGYTVPPARPPPPLTKKTCSSCSKDILNPKDVISAQFENTTTSKDFCSQSCLSTYELKKKPIVTINTNSISTKCSMCQKNAVIRHEVNYQNVVHKLCSDACFSKFRSANNLTMNCCENCGGYCYSGSGQCHMLQIEGQSKKFCSSSCITAYKQKSAKITPCALCKSLRSSAEMIENTNSLGKTELFCSVNCLSAYRVKMVTSAGVQVQCNSCKTSAIPQYHLAMSDGSIRNFCSYSCVVAFQNLFNKPTGMNSSVVPLSQGQVIVSIPTGSTVSAGGGSTSAVSPTSISSSAAAGLQRLAAQSQHVGFARSVVKLKCQHCNRLFATKPELLDYKGKMFQFCGKNCSDEYKKINNVMAMCEYCKIEKIVKETVRFSGADKSFCSEGCKLLYKHDLAKRWGNHCKMCSYCLQTSPKLVQNNLGGKVEEFCCEECMSKYTVLFYQMAKCDACKRQGKLSESLKWRGEMKHFCNLLCILMFCNQQSVCDPPSQNNAANISMVQAASAGPPSLRKDSTPVIANVVSLASAPAAQPTVNSNSVLQGAVPTVTAKIIGDASTQTDALKLPPSQPPRLLKNKALLCKPITQTKATSCKPHTQNKECQTEDTPSQPQIIVVPVPVPVFVPIPLHLYTQYAPVPFGIPVPMPVPMLIPSSMDSEDKVTESIEDIKEKLPTHPFEADLLEMAEMIAEDEEKKTLSQGESQTSEHELFLDTKIFEKDQGSTYSGDLESEAVSTPHSWEEELNHYALKSNAVQEADSELKQFSKGETEQDLEADFPSDSFDPLNKGQGIQARSRTRRRHRDGFPQPRRRGRKKSIVAVEPRSLIQGAFQGCSVSGMTLKYMYGVNAWKNWVQWKNAKEEQGDLKCGGVEQASSSPRSDPLGSTQDHALSQESSEPGCRVRSIKLKEDILSCTFAELSLGLCQFIQEVRRPNGEKYDPDSILYLCLGIQQYLFENGRIDNIFTEPYSRFMIELTKLLKIWEPTILPNGYMFSRIEEEHLWECKQLGAYSPIVLLNTLLFFNTKYFQLKNVTEHLKLSFAHVMRRTRTLKYSTKMTYLRFFPPLQKQESEPDKLTVGKRKRNEDDEVPVGVEMAENTDNPLRCPVRLYEFYLSKCSESVKQRNDVFYLQPERSCVPNSPMWYSTFPIDPGTLDTMLTRILMVREVHEELAKAKSEDSDVELSD

SEQ ID NO: 5498 - protein, 1507 aa, Homo sapiens
MTTVVVHVDSKAELTTLLEQWEKEHGSGQDMVPILTRMSQLIEKETEEYRKGDPDPFDDRHPGRADPECMLGHLLRILFKNDDFMNALVNAYVMTSREPPLNTAACRLLLDIMPGLETAVVFQEKEGIVENLFKWAREADQPLRTYSTGLLGGAMENQDIAANYRDENSQLVAIVLRRLRELQLQEVALRQENKRPSPRKLSSEPLLPLDEEAVDMDYGDMAVDVVDGDQEEASGDMEISFHLDSGHKTSSRVNSTTKPEDGGLKKNKSAKQGDRENFRKAKQKLGFSSSDPDRMFVELSNSSWSEMSPWVIGTNYTLYPMTPAIEQRLILQYLTPLGEYQELLPIFMQLGSRELMMFYIDLKQTNDVLLTFEALKHLASLLLHNKFATEFVAHGGVQKLLEIPRPSMAATGVSMCLYYLSYNQDAMERVCMHPHNVLSDVVNYTLWLMECSHASGCCHATMFFSICFSFRAVLELFDRYDGLRRLVNLISTLEILNLEDQGALLSDDEIFASRQTGKHTCMALRKYFEAHLAIKLEQVKQSLQRTEGGILVHPQPPYKACSYTHEQIVEMMEFLIEYGPAQLYWEPAEVFLKLSCVQLLLQLISIACNWKTYYARNDTVRFALDVLAILTVVPKIQLQLAESVDVLDEAGSTVSTVGISIILGVAEGEFFIHDAEIQKSALQIIINCVCGPDNRISSIGKFISGTPRRKLPQNPKSSEHTLAKMWNVVQSNNGIKVLLSLLSIKMPITDADQIRALACKALVGLSRSSTVRQIISKLPLFSSCQIQQLMKEPVLQDKRSDHVKFCKYAAELIERVSGKPLLIGTDVSLARLQKADVVAQSRISFPEKELLLLIRNHLISKGLGETATVLTKEADLPMTAASHSSAFTPVTAAASPVSLPRTPRIANGIATRLGSHAAVGASAPSAPTAHPQPRPPQGPLALPGPSYAGNSPLIGRISFIRERPSPCNGRKIRVLRQKSDHGAYSQSPAIKKQLDRHLPSPPTLDSIITEYLREQHARCKNPVATCPPFSLFTPHQCPEPKQRRQAPINFTSRLNRRASFPKYGGVDGGCFDRHLIFSRFRPISVFREANEDESGFTCCAFSARERFLMLGTCTGQLKLYNVFSGQEEASYNCHNSAITHLEPSRDGSLLLTSATWSQPLSALWGMKSVFDMKHSFTEDHYVEFSKHSQDRVIGTKGDIAHIYDIQTGNKLLTLFNPDLANNYKRNCATFNPTDDLVLNDGVLWDVRSAQAIHKFDKFNMNISGVFHPNGLEVIINTEIWDLRTFHLLHTVPALDQCRVVFNHTGTVMYGAMLQADDEDDLMEERMKSPFGSSFRTFNATDYKPIATIDVKRNIFDLCTDTKDCYLAVIENQGSMDALNMDTVCRLYEVGRQRLAEDEDEEEDQEEEEQEEEDDDEDDDDTDDLDELDTDQLLEAELEEDDNNENAGEDGDNDFSPSDEELANLLEEGEDGEDEDSDADEEVELILGDTDSSDNSDLEDDIILSLNE

SEQ ID NO: 5499 - protein, 213 aa, Homo sapiens
MSVELEEALPVTTAEGMAKKVTKAGGSAALSPSKKRKNSKKKNQPGKYSQLVVETIRRLGERNGSSLAKIYTEAKKVPWFDQQNGRTYLKYSIKALVQNDTLLQVKGTGANGSFKLNRKKLEGGGERRGAPAAATAPAPTAHKAKKAAPGAAGSRRADKKPARGQKPEQRSHKKGAGAKKDKGGKAKKTAAAGGKKVKKAAKPSVPKVPKGRK

SEQ ID NO: 5500 - protein, 165 aa, Homo sapiens
MKCVFVTVGTTSFDDLIACVSAPDSLQKIESLGYNRLILQIGRGTVVPEPFSTESFTLDVYRYKDSLKEDIQKADLVISHAGAGSCLETLEKGKPLVVVINEKLMNNHQLELAKQLHKEGHLFYCTCSTLPGLLQSMDLSTLKCYPPGQPEKFSAFLDKVVGLQK

SEQ ID NO: 5501 - protein, 606 aa, Homo sapiens [sequence omitted]

SEQ ID NO: 5502 - protein, 417 aa, Homo sapiens
MGSAHPRPWLRLRPQPQPRPALWVLLFFLLLLAAAMPRSAPNDILDLRLPPEPVLNANTVCLTLPGLSRRQMEVCVRHPDVAASAIQGIQIAIHECQHQFRDQRWNCSSLETRNKIPYESPIFSRGFRESAFAYAIAAAGVVHAVSNACALGKLKACGCDASRRGDEEAFRRKLHRLQLDALQRGKGLSHGVPEHPALPTASPGLQDSWEWGGCSPDMGFGERFSKDFLDSREPHRDIHARMRLHNNRVGRQAVMENMRRKCKCHGTSGSCQLKTCWQVTPEFRTVGALLRSRFHRATLIRPHNRNGGQLEPGPAGAPSPAPGAPGPRRRASPADLVYFEKSPDFCEREPRLDSAGTVGRLCNKSSAGSDGCGSMCCGRGHNILRQTRSERCHCRFHWCCFVVCEECRITEWVSVCK

SEQ ID NO: 5503 - protein, 718 aa, Homo sapiens
MCASVKYNIRGPALIPRMKTKHRIYYITLFSIVLLGLIATGMFQFWPHSIESSNDWNVEKRSIRDVPVVRLPADSPIPERGDLSCRMHTCFDVYRCGFNPKNKIKVYIYALKKYVDDFGVSVSNTISREYNELLMAISDSDYYTDDINRACLFVPSIDVLNQNTLRIKETAQAMAQLSRWDRGTNHLLFNMLPGGPPDYNTALDVPRDRALLAGGGFSTWTYRQGYDVSIPVYSPLSAEVDLPEKGPGPRQYFLLSSQVGLHPEYREDLEALQVKHGESVLVLDKCTNLSEGVLSVRKRCHKHQVFDYPQVLQEATFCVVLRGARLGQAVLSDVLQAGCVPVVIADSYILPFSEVLDWKRASVVVPEEKMSDVYSILQSIPQRQIEEMQRQARWFWEAYFQSIKAIALATLQIINDRIYPYAAISYEEWNDPPAVKWGSVSNPLFLPLIPPQSQGFTAIVLTYDRVESLFRVITEVSKVPSLSKLLVVWNNQNKNPPEDSLWPKIRVPLKVVRTAENKLSNRFFPYDEIETEAVLAIDDDIIMLTSDELQFGYEVWREFPDRLVGYPGRLHLWDHEMNKWKYESEWTNEVSMVLTGAAFYHKYFNYLYTYKMPGDIKNWVDAHMNCEDIAMNFLVANVTGKAVIKVTPRKKFKCPECTAIDGLSLDQTHMVERSECINKFASVFGTMPLKVVEHRADPVLYKDDFPEKLKSFPNIGSL

SEQ ID NO: 5504 - protein, 718 aa, Homo sapiens; identical to SEQ ID NO: 5503

SEQ ID NO: 5505 - protein, 554 aa, Homo sapiens
MAAADLSHGHYLSGDPVCLHEEKTPAGRIVADCLTDCYQDSVTFDDVAVDFTQEEWTLLDSTQRSLYSDVMLENYKNLATVGGQIIKPSLISWLEQEESRTVQGGVLQGWEMRLETQWSILQQDFLRGQTSIGIQLEGKHNGRELCDCEQCGEVFSEHSCLKTHVRTQSTGNTHDCNQYGKDFLTLCEKTSTGEKLSEFNQSEKIFSLTPNIVYQRTSTQEKSFECSHCGKSFINESYLQAHMRTHNGEKLYEWRNYGPGFIDSTSLSVLIETLNAKKPYKCKECGKGYRYPAYLSIHMRTHTGEKPYECKECGKAFNYSNSFQIHGRTHTGEKPYVCKECGKAFTQYSGLSMHVRSHSGDKPYECKECGKSFLTSSRLIQHIRTHTGEKPFVCVECGKAFAVSSNLSGHLRTHTEEKACECKICGKVFGYPSCLNNHMRTHSAQKPYTCKECGKAFNYSTHLKIHMRIHTGEKPYECKQCGKAFSHSSSFQIHERTHTGEKPYECKECGKAFTCSSSFRIHEKTHTEEKPYKCQQCGKAYSHPRSLRRHEQIH

SEQ ID NO: 5506 - protein, 160 aa, Homo sapiens
MAAERKTKLSKNLLRMKFMQRGLDSETKKQLEEEEKKIISEEHWYLDLPELKEKESFIIEEQSFLLCEDLLYGRMSFRGFNPEVEKLMLQMNAKHKAEEVEDETVELDVSDEEMARRYETLVGTIGKKFARKRDHANYEEDENGDITPIKAKKMFLKPQD

SEQ ID NO: 5507 - protein, 518 aa, Homo sapiens
MGALARALLLPLLAQWLLRAAPELAPAPFTLPLRVAAATNRVVAPTPGPGTPAERHADGLALALEPALASPAGAANFLAMVDNLQGDSGRGYYLEMLIGTPPQKLQILVDTGSSNFAVAGTPHSYIDTYFDTERSSTYRSKGFDVTVKYTQGSWTGFVGEDLVTIPKGFNTSFLVNIATIFESENFFLPGIKWNGILGLAYATLAKPSSSLETFFDSLVTQANIPNVFSMQMCGAGLPVAGSGTNGGSLVLGGIEPSLYKGDIWYTPIKEEWYYQIEILKLEIGGQSLNLDCREYNADKAIVDSGTTLLRLPQKVFDAVVEAVARASLIPEFSDGFWTGSQLACWTNSETPWSYFPKISIYLRDENSSRSFRITILPQLYIQPMMGAGLNYECYRFGISPSTNALVIGATVMEGFYVIFDRAQKRVGFAASPCAEIAGAAVSEISGPFSTEDVASNCVPAQSLSEPILWIVSYALMSVCGAILLVLIVLLLLPFRCQRRPRDPEVVNDESSLVRHRWK

SEQ ID NO: 5508 - protein, 468 aa, Homo sapiens
MGALARALLLPLLAQWLLRAAPELAPAPFTLPLRVAAATNRVVAPTPGPGTPAERHADGLALALEPALASPAGAANFLAMVDNLQGDSGRGYYLEMLIGTPPQKLQILVDTGSSNFAVAGTPHSYIDTYFDTERSSTYRSKGFDVTVKYTQGSWTGFVGEDLVTIPKGFNTSFLVNIATIFESENFFLPGIKWNGILGLAYATLAKPSSSLETFFDSLVTQANIPNVFSMQMCGAGLPVAGSGTNGGSLVLGGIEPSLYKGDIWYTPIKEEWYYQIEILKLEIGGQSLNLDCREYNADKAIVDSGTTLLRLPQKVFDAVVEAVARASLLYIQPMMGAGLNYECYRFGISPSTNALVIGATVMEGFYVIFDRAQKRVGFAASPCAEIAGAAVSEISGPFSTEDVASNCVPAQSLSEPILWIVSYALMSVCGAILLVLIVLLLLPFRCQRRPRDPEVVNDESSLVRHRWK

SEQ ID NO: 5509 - protein, 396 aa, Homo sapiens
MGALARALLLPLLAQWLLRAAPELAPAPFTLPLRVAAATNRVVAPTPGPGTPAERHADGLALALEPALASPAGAANFLAMVDNLQGDSGRGYYLEMLIGTPPQKLQILVDTGSSNFAVAGTPHSYIDTYFDTERSSTYRSKGFDVTVKYTQGSWTGFVGEDLVTIPKGFNTSFLVNIATIFESENFFLPGIKWNGILGLAYATLAKPSSSLETFFDSLVTQANIPNVFSMQMCGAGLPVAGSGTNGGSLVLGGIEPSLYKGDIWYTPIKEEWYYQIEILKLEIGGQSLNLDCREYNADKAIVDSGTTLLRLPQKVFDAVVEAVARASLIPEFSDGFWTGSQLACWTNSETPWSYFPKISIYLRDENSSRSFRITILPQKLQVLQCLKFPGLSQQRM

SEQ ID NO: 5510 - protein, 442 aa, Homo sapiens
MEASRCRLSPSGDSVFHEEMMKMRQAKLDYQRLLLEKRQRKKRLEPFMVQPNPEARLRRAKPRASDEQTPLVNCHTPHSNVILHGIDGPAAVLKPDEVHAPSVSSSVVEEDAENTVDTASKPGLQERLQKHDISESVNFDEETDGISQSACLERPNSASSQNSTDTGTSGSATAAQPADNLLGDIDDLEDFVYSPAPQGVTVRCRIIRDKRGMDRGLFPTYYMYLEKEENQKIFLLAARKRKKSKTANYLISIDPVDLSREGESYVGKLRSNLMGTKFTVYDRGICPMKGRGLVGAAHTRQELAAISYETNVLGFKGPRKMSVIIPGMTLNHKQIPYQPQNNHDSLLSRWQNRTMENLVELHNKAPVWNSDTQSYVLNFRGRVTQASVKNFQIVHKNDPDYIVMQFGRVADDVFTLDYNYPLCAVQAFGIGLSSFDSKLACE

SEQ ID NO: 5511 - protein, 146 aa, Homo sapiens
MLAGAGRPGLPQGRHLCWLLCAFTLKLCQAEAPVQEEKLSASTSNLPCWLVEEFVVAEECSPCSNFRAKTTPECGPTGYVEKITCSSSKRNEFKSCRSALMEQRLFWKFEGAVVCVALIFACLVIIRQRQLDRKALEKVRKQIESI

SEQ ID NO: 5512 - protein, 208 aa, Homo sapiens
MVFYFTSSSVNSSAYTIYMGKDKYENEDLIKHGWPEDIWFHVDKLSSAHVYLRLHKGENIEDIPKEVLMDCAHLVKANSIQGCKMNNVNVVYTPWSNLKKTADMDVGQIGFHRQKDVKIVTVEKKVNEILNRLEKTKVERFPDLAAEKECRDREERNEKKAQIQEMKKREKEEMKKKREMDELRSYSSLMKVENMSSNQDGNDSDEFM

SEQ ID NO: 5513 - protein, 140 aa, Homo sapiens
MDCAHLVKANSIQGCKMNNVNVVYTPWSNLKKTADMDVGQIGFHRQKDVKIVTVEKKVNEILNRLEKTKVERFPDLAAEKECRDREERNEKKAQIQEMKKREKEEMKKKREMDELRSYSSLMKVENMSSNQDGNDSDEFM

SEQ ID NO: 5514 - protein, 144 aa, Homo sapiens
MDSEEEEEVPQPMPSIPEDLESQKAMVAFFNSAVASAEEEQARLCGQLKECTASAWLICWPRPRRNLRQQPQPQELGVIPCVGRPTRPCRGPWRSCGRVHRTVPEPEGSAEGGGVHQQAGPGQGRGEGEAAGAGVACGRLQQVA

SEQ ID NO: 5515 - protein, 654 aa, Homo sapiens
MKLSLVAAMLLLLSAARAEEEDKKEDVGTVVGIDLGTTYSCVGVFKNGRVEIIANDQGNRITPSYVAFTPEGERLIGDAAKNQLTSNPENTVFDAKRLIGRTWNDPSVQQDIKFLPFKVVEKKTKPYIQVDIGGGQTKTFAPEEISAMVLTKMKETAEAYLGKKVTHAVVTVPAYFNDAQRQATKDAGTIAGLNVMRIINEPTAAAIAYGLDKREGEKNILVFDLGGGTFDVSLLTIDNGVFEVVATNGDTHLGGEDFDQRVMEHFIKLYKKKTGKDVRKDNRAVQKLRREVEKAKRALSSQHQARIEIESFYEGEDFSETLTRAKFEELNMDLFRSTMKPVQKVLEDSDLKKSDIDEIVLVGGSTRIPKIQQLVKEFFNGKEPSRGINPDEAVAYGAAVQAGVLSGDQDTGDLVLLDVCPLTLGIETVGGVMTKLIPRNTVVPTKKSQIFSTASDNQPTVTIKVYEGERPLTKDNHLLGTFDLTGIPPAPRGVPQIEVTFEIDVNGILRVTAEDKGTGNKNKITITNDQNRLTPEEIERMVNDAEKFAEEDKKLKERIDTRNELESYAYSLKNQIGDKEKLGGKLSSEDKETMEKAVEEKIEWLESHQDADIEDFKAKKKELEEIVQPIISKLYGSAGPPPTGEEDTAEKDEL

SEQ ID NO: 5516 - protein, 163 aa, Homo sapiens
MADEEKLPPGWEKRMSRSSGRVYYFNHITNASQWERPSGNSSSGGKNGQGEPARVRCSHLLVKHSQSRRPSSWRQEKITRTKEEALELINGYIQKIKSGEEDFESLASQFSDCSSAKARGDLGAFSRGQMQKPFEDASFALRTGEMSGPVFTDSGIHIILRTE

SEQ ID NO: 5517 - protein, 537 aa, Homo sapiens
MEPRAVAEAVETGEEDVIMEALRSYNQEHSQSFTFDDAQQEDRKRLAELLVSVLEQGLPPSHRVIWLQSVRILSRDRNCLDPFTSRQSLQALACYADISVSEGSVPESADMDVVLESLKCLCNLVLSSPVAQMLAAEARLVVKLTERVGLYRERSFPHDVQFFDLRLLFLLTALRTDVRQQLFQELKGVRLLTDTLELTLGVTPEGNPPPTLLPSQETERAMEILKVLFNITLDSIKGEVDEEDAALYRHLGTLLRHCVMIATAGDRTEEFHGHAVNLLGNLPLKCLDVLLTLEPHGDSTEFMGVNMDVIRALLIFLEKRLHKTHRLKESVAPVLSVLTECARMHRPARKFLKAQGWPPPQVLPPLRDVRTRPEVGEMLRNKLVRLMTHLDTDVKRVAAEFLFVLCSESVPRFIKYTGYGNAAGLLAARGLMAGGRPEGQYSEDEDTDTDEYKEAKASINPVTGRVEEKPPNPMEGMTEEQKEHEAMKLVTMFDKLSRNRVIQPMGMSPRGHLTSLQDAMCETMEQQLSSDPDSDPD

SEQ ID NO: 5518 - protein, 155 aa, Homo sapiens
MGGNGSTCKPDTERQGTLSTAAPTTSPAPCLSNHHNKKHLILAFCAGVLLTLLLIAFIFLIIKSYRKYRRERLPISPGPLLRWVPLLSGTMADHSKPQAPDPHSDPPAKLSSIPGESLTYASTTFKLSEEKSNHLAENHSADFDPIVYAQIKVTN

SEQ ID NO: 5519 - protein, 2157 aa, Homo sapiens
MSVKEAGSSGRREQAAYHLHIYPQLSTTESQASCRVTATKDSTTSDVIKDAIASLRLDGTKCYVLVEVKESGGEEWVLDANDSPVHRVLLWPRRAQDEHPQEDGYYFLLQERNADGTIKYVHMQLVAQATATRRLVERGLLPRQQADFDDLCNLPELTEGNLLKNLKHRFLQQKIYTYAGSILVAINPFKFLPIYNPKYVKMYENQQLGKLEPHVFALADVAYYTMLRKRVNQCIVISGESGSGKTQSTNFLIHCLTALSQKGYASGVERTILGAGPVLEAFGNAKTAHNNNSSRFGKFIQVSYLESGIVRGAVVEKYLLEKSRLVSQEKDERNYHVFYYLLLGVSEEERQEFQLKQPEDYFYLNQHNLKIEDGEDLKHDFERLKQAMEMVGFLPATKKQIFAVLSAILYLGNVTYKKRATGREEGLEVGPPEVLDTLSQLLKVKREILVEVLTKRKTVTVNDKLILPYSLSEAITARDSMAKSLYSALFDWIVLRINHALLNKKDVEEAVSCLSIGVLDIFGFEDFERNSFEQFCINYANEQLQYYFNQHIFKLEQEEYQGEGITWHNIGYTDNVGCIHLISKKPTGLFYLLDEESNFPHATSQTLLAKFKQQHEDNKYFLGTPVMEPAFIIQHFAGKVKYQIKDFREKNMDYMRPDIVALLRGSDSSYVRELIGMDPVAVFRWAVLRAAIRAMAVLREAGRLRAERAEKAAGMSSPGAQSHPEELPRGASTPSEKLYRDLHNQMIKSIKGLPWQGEDPRSLLQSLSRLQKPRAFILKSKGIKQKQIIPKNLLDSKSLKLIISMTLHDRTTKSLLHLHKKKKPPSISAQFQTSLNKLLEALGKAEPFFIRCIRSNAEKKELCFDDELVLQQLRYTGMLETVRIRRSGYSAKYTFQDFTEQFQVLLPKDAQPCREVISTLLEKMKIDKRNYQIGKTKVFLKETERQALQETLHREVVRKILLLQSWFRMVLERRHFLQMKRAAVTIQACWRSYRVRRALERTQAAVYLQASWRGYWQRKLYRHQKQSIIRLQSLCRGHLQRKSFSQMISEKQKAEEKEREALEAARAGAEEGGQGQAAGGQQVAEQGPEPAEDGGHLASEPEVQPSDRSPLEHSSPEKEAPSPEKTLPPQKTVAAESHEKVPSSREKRESRRQRGLEHVKFQNKHIQSCKEESALREPSRRVTQEQGVSLLEDKKESREDETLLVVETEAENTSQKQPTEQPQAMAVGKVSEETEKTLPSGSPRPGQLERPTSLALDSRVSPPAPGSAPETPEDKSKPCGSPRVQEKPDSPGGSTQIQRYLDAERLASAVELWRGKKLVAAASPSAMLSQSLDLSDRHRATGAALTPTEERRTSFSTSDVSKLLPSLAKAQPAAETTDGERSAKKPAVQKKKPGDASSLPDAGLSPGSQVDSKSTFKRLFLHKTKDKKYSLEGAEELENAVSGHVVLEATTMKKGLEAPSGQQHRHAAGEKRTKEPGGKGKKNRNVKIGKITVSEKWRESVFRQITNANELKYLDEFLLNKINDLRSQKTPIESLFIEATEKFRSNIKTMYSVPNGKIHVGYKDLMENYQIVVSNLATERGQKDTNLVLNLFQSLLDEFTRGYTKNDFEPVKQSKAQKKKRKQERAVQEHNGHVFASYQVSIPQSCEQCLSYIWLMDKALLCSVCKMTCHKKCVHKIQSHCSYTYGRKGEPGVEPGHFGVCVDSLTSDKASVPIVLEKLLEHVEMHGLYTEGLYRKSGAANRTRELRQALQTDPAAVKLENFPIHAITGVLKQWLRELPEPLMTFAQYGDFLRAVELPEKQEQLAAIYAVLEHLPEANHNSLERLIFHLVKVALLEDVNRMSPGALAIIFAPCLLRCPDNSDPLTSMKDVLKITTCVEMLIKEQMRKYKVKMEEISQLEAAESIAFRRLSLLRQNAPWPLKLGFSSPYEGVLNKSPKTRDIQEEELEVLLEEEAAGGDEDREKEILIERIQSIKEEKEDITYRLPELDPRGSDEENLDSETSASTESLLEERAGRGASEGPPAPALPCPGAPTPSPLPTVAAPPRRRPSSFVTVRVKTPRRTPIMPTANIKLPPGLPSHLPRWAPGAREAAAPVRRREPPARRPDQIHSVYITPGADLPVQGALEPLEEDGQPPGAKRRYSDPPTYCLPPASGQTNG

SEQ ID NO: 5520 - protein, 419 aa, Homo sapiens
MPGRGRCPDCGSTELVEDSHYSQSQLVCSDCGCVVTEGVLTTTFSDEGNLREVTYSRSTGENEQVSRSQQRGLRRVRDLCRVLQLPPTFEDTAVAYYQQAYRHSGIRAARLQKKEVLVGCCVLITCRQHNWPLTMGAICTLLYADLDVFSSTYMQIVKLLGLDVPSLCLAELVKTYCSSFKLFQASPSVPAKYVEDKEKMLSRTMQLVELANETWLVTGRHPLPVITAATFLAWQSLQPADRLSCSLARFCKLANVDLPYPASSRLQELLAVLLRMAEQLAWLRVLRLDKRSVVKHIGDLLQHRQSLVRSAFRDGTAEVETREKEPPGWGQGQGEGEVGNNSLGLPQGKRPASPALLLPPCMLKSPKRICPVPPVSTVTGDENISDSEIEQYLRTPQEVRDFQRAQAARQAATSVPNPP

SEQ ID NO: 5521 - protein, 655 aa, Homo sapiens
MAEAPQVVEIDPDFEPLPRPRSCTWPLPRPEFSQSNSATSSPAPSGSAAANPDAAAGLPSASAAAVSADFMSNLSLLEESEDFPQAPGSVAAAVAAAAAAAATGGLCGDFQGPEAGCLHPAPPQPPPPGPLSQHPPVPPAAAGPLAGQPRKSSSSRRNAWGNLSYADLITKAIESSAEKRLTLSQIYEWMVKSVPYFKDKGDSNSSAGWKNSIRHNLSLHSKFIRVQNEGTGKSSWWMLNPEGGKSGKSPRRRAASMDNNSKFAKSRSRAAKKKASLQSGQEGAGDSPGSQFSKWPASPGSHSNDDFDNWSTFRPRTSSNASTISGRLSPIMTEQDDLGEGDVHSMVYPPSAAKMASTLPSLSEISNPENMENLLDNLNLLSSPTSLTVSTQSSPGTMMQQTPCYSFAPPNTSLNSPSPNYQKYTYGQSSMSPLPQMPIQTLQDNKSSYGGMSQYNCAPGLLKELLTSDSPPHNDIMTPVDPGVAQPNSRVLGQNVMMGPNSVMSTYGSQASHNKMMNPSSHTHPGHAQQTSAVNGRPLPHTVSTMPHTSGMNRLTQVKTPVQVPLPHPMQMSALGGYSSVSSCNGYGRMGLLHQEKLPSDLDGMFIERLDCDMESIIRNDLMDGDTLDFNFDNVLPNQSFPHSVKTTTHSWVSG

SEQ ID NO: 5522 - protein, 723 aa, Homo sapiens
MFEEKASSPSGKMGGEEKPIGAGEEKQKEGGKKKNKEGSGDGGRAELNPWPEYIYTRLEMYNILKAEHDSILAEKAEKDSKPIKVTLPDGKQVDAESWKTTPYQIACGISQGLADNTVIAKVNNVVWDLDRPLEEDCTLELLKFEDEEAQAVYWHSSAHIMGEAMERVYGGCLCYGPPIENGFYYDMYLEEGGVSSNDFSSLEALCKKIIKEKQAFERLEVKKETLLAMFKYNKFKCRILNEKVNTPTTTVYRCGPLIDLCRGPHVRHTGKIKALKIHKNSSTYWEGKADMETLQRIYGISFPDPKMLKEWEKFQEEAKNRDHRKIGRDQELYFFHELSPGSCFFLPKGAYIYNALIEFIRSEYRKRGFQEVVTPNIFNSRLWMTSGHWQHYSENMFSFEVEKELFALKPMNCPGHCLMFDHRPRSWRELPLRLADFGVLHRNELSGALTGLTRVRRFQQDDAHIFCAMEQIEDEIKGCLDFLRTVYSVFGFSFKLNLSTRPEKFLGDIEVWDQAEKQLENSLNEFGEKWELNSGDGAFYGPKIDIQIKDAIGRYHQCATIQLDFQLPIRFNLTYVSHDGDDKKRPVIVHRAILGSVERMIAILTENYGGKWPFWLSPRQVMVVPVGPTCDEYAQKVRQQFHDAKFMADIDLDPGCTLNKKIRNAQLAQYNFILVVGEKEKISGTVNIRTRDNKVHGERTISETIERLQQLKEFRSKQAEEEF

SEQ ID NO: 5523 - protein, 357 aa, Homo sapiens
MGGAVSAGEDNDDLIDNLKEAQYIRTERVEQAFRAIDRGDYYLEGYRDNAYKDLAWKHGNIHLSAPCIYSEVMEALKLQPGLSFLNLGSGTGYLSTMVGLILGPFGINHGIELHSDVVEYAKEKLESFIKNSDSFDKFEFCEPAFVVGNCLQIASDSHQYDRIYCGAGVQKDHENYMKILLKVGGILVMPIEDQLTQIMRTGQNTWESKNILAVSFAPLVQPSKNDNGKPDSVGLPPCAVRNLQDLARIYIRRTLRNFINDEMQAKGIPQRAPPKRKRKRVKQRINTYVFVGNQLIPQPLDSEEDEKMEEDIKEEEEKDHNEAMKPEEPPQNLLREKIMKLPLPESLKAYLTYFRDK

SEQ ID NO: 5524 - protein, 441 aa, Homo sapiens
MDDDDFGGFEAAETFDGGSGETQTTSPAIPWAAFPAVSGVHLSPSSPEIVLDRDHSSSIGCLSSDAIISSPENTHAANSIVSQTIPKAQIQQSTHTHLDISLFPLGLTDEKSNGTIALVDDSEDPGANVSNIQLQQKISSLEIKLKVSEEEKQRIKQDVESLMEKHNVLEKGFLKEKEQEAISFQDRYKELQEKHKQELEDMRKAGHEALSIIVDEYKALLQSSVKQQVEAIEKQYISAIEKQAHKCEELLNAQHQRLLEMLDTEKELLKEKIKEALIQQSQEQKEILEKCLEEERQRNKEALVSAAKLEKEAVKDAVLKVVEEERKNLEKAHAEERELWKTEHAKDQEKVSQEIQKAIQEQRKISQETVKAAIIEEQKRSEKAVEEAVKRTRDELIEYIKEQKRLDQVIRQRSLSSLELFLSCAQKQLSALIATEPVDIE

SEQ ID NO: 5525 - protein, 374 aa, Homo sapiens
MAASAAAAELQASGGPRHPVCLLVLGMAGSGKTTFVQRLTGHLHAQGTPPYVINLDPAVHEVPFPANIDIRDTVKYKEVMKQYGLGPNGGIVTSLNLFATRFDQVMKFIEKAQNMSKYVLIDTPGQIEVFTWSASGTIITEALASSFPTVVIYVMDTSRSTNPVTFMSNMLYACSILYKTKLPFIVVMNKTDIIDHSFAVEWMQDFEAFQDALNQETTYVSNLTRSMSLVLDEFYSSLRVVGVSAVLGTGLDELFVQVTSAAEEYEREYRPEYERLKKSLANAESQQQREQLERLRKDMGSVALDAGTAKDSLSPVLHPSDLILTRGTLDEEDEEADSDTDDIDHRVTEESHEEPAFQNFMQESMAQYWKRNNK

SEQ ID NO: 5526 - protein, 549 aa, Homo sapiens
MKRPKLKKASKRMTCHKRYKIQKKVREHHRKLRKEAKKRGHKKPRKDPGVPNSAPFKEALLREAELRKQRLEELKQQQKLDRQKELEKKRKLETNPDIKPSNVEPMEKEFGLCKTENKAKSGKQNSKKLYCQELKKVIEASDVVLEVLDARDPLGCRCPQVEEAIVQSGQKKLVLILNKSDLVPKENLESWLNYLKKELPTVVFRASTKPKDKGKITKRVKAKKNAAPFRSEVCFGKEGLWKLLGGFQETCSKAIRVGVIGFPNVGKSSIINSLKQEQMCNVGVSMGLTRSMQVVPLDKQITIIDSPSFIVSPLNSSSALALRSPASIEVVKPMEAASAILSQADARQVVLKYTVPGYRNSLEFFTVLAQRRGMHQKGGIPNVEGAAKLLWSEWTGASLAYYCHPPTSWTPPPYFNESIVVDMKSGFNLEELEKNNAQSIRAIKGPHLANSILFQSSGLTNGIIEEKDIHEELPKRKERKQEEREDDKDSDQETVDEEVDENSSGMFAAEETGEALSEETTAGEQSTRSFILDKIIEEDDAYDFSTDYV

SEQ ID NO: 5527 - protein, 537 aa, Homo sapiens
MTCHKRYKIQKKVREHHRKLRKEAKKRGHKKPRKDPGVPNSAPFKEALLREAELRKQRLEELKQQQKLDRQKELEKKRKLETNPDIKPSNVEPMEKEFGLCKTENKAKSGKQNSKKLYCQELKKVIEASDVVLEVLDARDPLGCRCPQVEEAIVQSGQKKLVLILNKSDLVPKENLESWLNYLKKELPTVVFRASTKPKDKGKITKRVKAKKNAAPFRSEVCFGKEGLWKLLGGFQETCSKAIRVGVIGFPNVGKSSIINSLKQEQMCNVGVSMGLTRSMQVVPLDKQITIIDSPSFIVSPLNSSSALALRSPASIEVVKPMEAASAILSQADARQVVLKYTVPGYRNSLEFFTVLAQRRGMHQKGGIPNVEGAAKLLWSEWTGASLAYYCHPPTSWTPPPYFNESIVVDMKSGFNLEELEKNNAQSIRAIKGPHLANSILFQSSGLTNGIIEEKDIHEELPKRKERKQEEREDDKDSDQETVDEEVDENSSGMFAAEETGEALSEETTAGEQSTRSFILDKIIEEDDAYDFSTDYV

SEQ ID NO: 5528 - protein, 537 aa, Homo sapiens; identical to SEQ ID NO: 5527

SEQ ID NO: 5529 - protein, 692 aa, Homo sapiens
MEKYERIRVVGRGAFGIVHLCLRKADQKLVIIKQIPVEQMTKEERQAAQNECQVLKLLNHPNVIEYYENFLEDKALMIAMEYAPGGTLAEFIQKRCNSLLEEETILHFFVQILLALHHVHTHLILHRDLKTQNILLDKHRMVVKIGDFGISKILSSKSKAYTVVGTPCYISPELCEGKPYNQKSDIWALGCVLYELASLKRAFEAANLPALVLKIMSGTFAPISDRYSPELRQLVLSLLSLEPAQRPPLSHIMAQPLCIRALLNLHTDVGSVRMRRAEKSVAPSNTGSRTTSVRCRGIPRGPVRPAIPPPLSSVYAWGGGLGTPLRLPMLNTEVVQVAAGRTQKAGVTRSGRLILWEAPPLGAGGGSLLPGAVEQPQPQFISRFLEGQSGVTIKHVACGDFFTACLTDRGIIMTFGSGSNGCLGHGSLTDISQPTIVEALLGYEMVQVACGASHVLALSTERELFAWGRGDSGRLGLGTRESHSCPQQVPMPPGQEAQRVVCGIDSSMILTVPGQALACGSNRFNKLGLDHLSLGEEPVPHQQVEEALSFTLLGSAPLDQEPLLSIDLGTAHSAAVTASGDCYTFGSNQHGQLGTNTRRGSRAPCKVQGLEGIKMAMVACGDAFTVAIGAESEVYSWGKGARGRLGRRDEDAGLPRPVQLDETHPYTVTSVSCCHGNTLLAVRSVTDEPVPP

SEQ ID NO: 5530 - protein, 460 aa, Homo sapiens
MNFSEVFKLSSLLCKFSPDGKYLASCVQYRLVVRDVNTLQILQLYTCLDQIQHIEWSADSLFILCAMYKRGLVQVWSLEQPEWHCKIDEGSAGLVASCWSPDGRHILNTTEFHLRITVWSLCTKSVSYIKYPKACLQGITFTRDGRYMALAERRDCKDYVSIFVCSDWQLLRHFDTDTQDLTGIEWAPNGCVLAVWDTCLEYKILLYSLDGRLLSTYSAYEWSLGIKSVAWSPSSQFLAVGSYDGKVRILNHVTWKMITEFGHPAAINDPKIVVYKEAEKSPQLGLGCLSFPPPRAGAGPLPSSESKYEIASVPVSLQTLKPVTDRANPKMGIGMLAFSPDSYFLATRNDNIPNAVWVWDIQKLRLFAVLEQLSPVRAFQWDPQQPRLAICTGGSRLYLWSPAGCMSVQVPGEGDFAVLSLCWHLSGDSMALLSKDHFCLCFLETEAVVGTACRQLGGHT

SEQ ID NO: 5531 - protein, 1855 aa, Homo sapiens
MAASELYTKFARVWIPDPEEVWKSAELLKDYKPGDKVLLLHLEEGKDLEYHLDPKTKELPHLRNPDILVGENDLTALSYLHEPAVLHNLRVRFIDSKLIYTYCGIVLVAINPYEQLPIYGEDIINAYSGQNMGDMDPHIFAVAEEAYKQMARDERNQSIIVSGESGAGKTVSAKYAMRYFATVSGSASEANVEEKVLTSNPIMESIGNAKTTRNDNSSRFGKYIEIGFDKRYRIIGANMRTYLLEKSRVVFQAEEERNYHIFYQLCASAKLPEFKMLRLGNADNFNYTKQGGSPVIEGVDDAKEMAHTRQACTLLGISESHQMGIFRILAGILHLGNVGFTSRDADSCTIPPKHEPLCIFCDLMGVDYEEMCHWLCHRKLATATETYIKPISKLQATNARDALAKHIYAKLFNWIVDNVNQALHSAVKQHSFIGVLDIYGFETFEINSFEQFCINYANEKLQQQFNMHVFKLEQEEYMKEQIPWTLIDFYDNQPCINLIESKLGILDLLDEECKMPKGTDDTWAQKLYNTHLNKCALFEKPRLSNKAFIIQHFADKVEYQCEGFLEKNKDTVFEEQIKVLKSSKFKMLPELFQDDEKAISPTSATSSGRTPLTRTPAKPTKGRPGQMAKEHKKTVGHQFRNSLHLLMETLNATTPHYVRCIKPNDFKLPFTFDEKRAVQQLRACGVLETIRISAAGFPSRWTYQEFFSRYRVLMKQKDVLSDRKQTCKNVLEKLILDKDKYQFGKTKIFFRAGQVAYLEKLRADKLRAACIRIQKTIRGWLLRKKYLRMRKAAITMQRYVRGYQARCYAKFLRRTKAATIIQKYWRMYVVRRRYKIRRAATIVLQSYLRGFLARNRYRKILRGHKAVIIQKRVRGWLARTHYKRSMHAIIYLQCCFRRMMAKRELKKLKIEARSVERYKKLRIGMENKIMQLQRKVDEQNKDYKCLVEKLTNLEGIYNSETEKLRSDLERLQLSEEEAKVATGRVLSLQEEIAKLRKDLEQTRSEKKCIEEHADRYKQETEQLVSNLKEENTLLKQEKEALNHRIVQQAKEMTETMEKKLVEETKQLELDLNDERLRYQNLLNEFSRLEERYDDLKEEMTLMVHVPKPGHKRTDSTHSSNESEYIFSSEIAEMEDIPSRTEEPSEKKVPLDMSLFLKLQKRVTELEQEKQVMQDELDRKEEQVLRSKAKEEERPQIRGAELEYESLKRQELESENKKLKNELNELRKALSEKSAPEVTAPGAPAYRVLMEQLTSVSEELDVRKEEVLILRSQLVSQKEAIQPKDDKNTMTDSTILLEDVQKMKDKGEIAQAYIGLKETNRSSALDYHELNEDGELWLVYEGLKQANRLLESQLQSQKRSHENEAEALRGEIQSLKEENNRQQQLLAQNLQLPPEARIEASLQHEITRLTNENLDLMEQLEKQDKTVRKLKKQLKVFAKKIGELEVGQMENISPGQIIDEPIRPVNIPRKEKDFQGMLEYKKEDEQKLVKNLILELKPRGVAVNLIPGLPAYILFMCVRHADYLNDDQKVRSLLTSTINSIKKVLKKRGDDFETVSFWLSNTCRFLHCLKQYSGEEGFMKHNTSRQNEHCLTNFDLAEYRQVLSDLAIQIYQQLVRVLENILQPMIVSGMLEHETIQGVSGVKPTGLRKRTSSIADEGTYTLDSILRQLNSFHSVMCQHGMDPELIKQVVKQMFYIIGAITLNNLLLRKDMCSWSKGMQIRYNVSQLEEWLRDKNLMNSGAKETLEPLIQAAQLLQVKKKTDDDAEAICSMCNALTTAQIVKVLNLYTPVNEFEERVSVSFIRTIQMRLRDRKDSPQLLMDAKHIFPVTFPFNPSSLALETIQIPASLGLGFISRV

SEQ ID NO: 5532 - protein, 99 aa, Homo sapiens
MAAAAASRGVGAKLGLREIRIHLCQRSPGSQGVRDFIEKRYVELKKANPDLPILIRECSDVQPKLWARYAFGQETNVPLNNFSADQVTRALENVLSGKA

SEQ ID NO: 5533 - protein, 363 aa, Homo sapiens
MASKSWLNFLTFLCGSAIGFLLCSQLFSILLGEKVDTQPNVLHNDPHARHSDDNGQNHLEGQMNFNADSSQHKDENTDIAENLYQKVRILCWVMTGPQNLEKKAKHVKATWAQRCNKVLFMSSEENKDFPAVGLKTKEGRDQLYWKTIKAFQYVHEHYLEDADWFLKADDDTYVILDNLRWLLSKYDPEEPIYFGRRFKPYVKQGYMSGGAGYVLSKEALKRFVDAFKTDKCTHSSSIEDLALGRCMEIMNVEAGDSRDTIGKETFHPFVPEHHLIKGYLPRTFWYWNYNYYPPVEGPGCCSDLAVSFHYVDSTTMYELEYLVYHLRPYGYLYRYQPTLPERILKEISQANKNEDTKVKLGNP

SEQ ID NO: 5534 - protein, 101 aa, Homo sapiens
MACPLEKALDVMVSTFHKYSGKEGDKFKLNKSELKELLTRELPSFLGKRTDEAAFQKLMSNLDSNRDNEVDFQEYCVFLSCIAMMCNEFFEGFPDKQPRKK

SEQ ID NO: 5535 - protein, 101 aa, Homo sapiens; identical to SEQ ID NO: 5534

SEQ ID NO: 5536 - protein, 365 aa, Homo sapiens
MAARLGALAASGLYRRRQHRQSPPPATGNMSDALANAVCQRCQARFSPAERIVNSNGELYHEHCFVCAQCFRPFPEGLFYEFEGRKYCEHDFQMLFAPCCGSCGEFIIGRVIKAMNNNWHPGCFRCELCDVELADLGFVKNAGRHLCRPCHNREKAKGLGKYICQRCHLVIDEQPLMFRSDAYHPDHFNCTHCGKELTAEARELKGELYCLPCHDKMGVPICGACRRPIEGRVVNALGKQWHVEHFVCAKCEKPFLGHRHYEKKGLAYCETHYNQLFGDVCYNCSHVIEGDVVSALNKAWCVSCFSCSTCNSKLTLKNKFVEFDMKPVCKRCYEKFPLELKKRLKKLSELTSRKAQPKATDLNSA

SEQ ID NO: 5537 - protein, 1015 aa, Homo sapiens
MTVSQKGGPQPTPSPAGPGTQLGPITGEMDEADSAFLKFKQTADDSLSLTSPNTESIFVEDPYTASLRSEIESDGHEFEAESWSLAVDAAYAKKQKREVVKRQDVLYELMQTEVHHVRTLKIMLKVYSRALQEELQFSSKAIGRLFPCADDLLETHSHFLARLKERRQESLEEGSDRNYVIQKIGDLLVQQFSGENGERMKEKYGVFCSGHNEAVSHYKLLLQQNKKFQNLIKKIGNFSIVRRLGVQECILLVTQRITKYPVLVERIIQNTEAGTEDYEDLTQALNLIKDIISQVDAKVSECEKGQRLREIAGKMDLKSSSKLKNGLTFRKEDMLQRQLHLEGMLCWKTTSGRLKDILAILLTDVLLLLQEKDQKYVFASVDSKPPVISLQKLIVREVANEEKAMFLISASLQGPEMYEIYTSSKEDRNAWMAHIQRAVESCPDEEEGPFSLPEEERKVVEARATRLRDFQERLSMKDQLIAQSLLEKQQIYLEMAEMGGLEDLPQPRGLFRGGDPSETLQGELILKSAMSEIEGIQSLICRQLGSANGQAEDGGSSTGPPRRAETFAGYDCTNSPTKNGSFKKKVSSTDPRPRDWRGPPNSPDLKLSDSDIPGSSEESPQVVEAPGTESDPRLPTVLESELVQRIQTLSQLLLNLQAVIAHQDSYVETQRAAIQEREKQFRLQSTRGNLLLEQERQRNFEKQREERAALEKLQSQLRHEQQRWERERQWQHQELERAGARLQEREGEARQLRERLEQERAELERQRQAYQHDLERLREAQRAVERERERLELLRRLKKQNTAPGALPPDTLAEAQPPSHPPSFNGEGLEGPRVSMLPSGVGPEYAERPEVARRDSAPTENRLAKSDVPIQLLSATNQFQRQAAVQQQIPTKLAASTKGGKDKGGKSRGSQRWESSASFDLKQQLLLNKLMGKDESTSRNRRSLSPILPGRHSPAPPPDPGFPAPSPPPADSPSEGFSLKAGGTALLPGPPAPSPLPATPLSAKEDASKEDVIFF

SEQ ID NO: 5538 - protein, 805 aa, Homo sapiens
MANVSKKVSWSGRDRDDEEAAPLLRRTARPGGGTPLLNGAGPGAARQSPRSALFRVGHMSSVELDDELLDPDMDPPHPFPKEIPHNEKLLSLKYESLDYDNSENQLFLEEERRINHTAFRTVEIKRWVICALIGILTGLVACFIDIVVENLAGLKYRVIKGNIDKFTEKGGLSFSLLLWATLNAAFVLVGSVIVAFIEPVAAGSGIPQIKCFLNGVKIPHVVRLKTLVIKVSGVILSVVGGLAVGKEGPMIHSGSVIAAGISQGRSTSLKRDFKIFEYFRRDTEKRDFVSAGAAAGVSAAFGAPVGGVLFSLEEGASFWNQFLTWRIFFASMISTFTLNFVLSIYHGNMWDLSSPGLINFGRFDSEKMAYTIHEIPVFIAMGVVGGVLGAVFNALNYWLTMFRIRYIHRPCLQVIEAVLVAAVTATVAFVLIYSSRDCQPLQGGSMSYPLQLFCADGEYNSMAAAFFNTPEKSVVSLFHDPPGSYNPLTLGLFTLVYFFLACWTYGLTVSAGVFIPSLLIGAAWGRLFGISLSYLTGAAIWADPGKYALMGAAAQLGGIVRMTLSLTVIMMEATSNVTYGFPIMLVLMTAKIVGDVFIEGLYDMHIQLQSVPFLHWEAPVTSHSLTAREVMSTPVTCLRRREKVGVIVDVLSDTASNHNGFPVVEHADDTQPARLQGLILRSQLIVLLKHKVFVERSNLGLVQRRLRLKDFRDAYPRFPPIQSIHVSQDERECTMDLSEFMNPSPYTVPQEASLPRVFKLFRALGLRHLVVVDNRNQVVGLVTRKDLARYRLGKRGLEELSLAQT

SEQ ID NO: 5539 - protein, 870 aa, Homo sapiens
MNSNLPAENLTIAVNMTKTLPTAVTHGFNSTNDPPSMSITRLFPALLECFGIVLCGYIAGRANVITSTQAKGLGNFVSRFALPALLFKNMVVLNFSNVDWSFLYSILIAKASVFFIVCVLTLLVASPDSRFSKAGLFPIFATQSNDFALGYPIVEALYQTTYPEYLQYIYLVAPISLMMLNPIGFIFCEIQKWKDTQNASQNKIKIVGLGLLRVLQNPIVFMVFIGIAFNFILDRKVPVYVENFLDGLGNSFSGSALFYLGLTMVGKIKRLKKSAFVVLILLITAKLLVLPLLCREMVELLDKGDSVVNHTSLSNYAFLYGVFPVAPGVAIFATQFNMEVEIITSGMVISTFVSAPIMYVSAWLLTFPTMDPKPLAYAIQNVSFDISIVSLISLIWSLAILLLSKKYKQLPHMLTTNLLIAQSIVCAGMMIWNFVKEKNFVGQILVFVLLYSSLYSTYLWTGLLAISLFLLKKRERVQIPVGIIIISGWGIPALLVGVLLITGKHNGDSIDSAFFYGKEQMITTAVTLFCSILIAGISLMCMNQTAQAGSYEGFDQSQSHKVVEPGNTAFEESPAPVNEPELFTSSIPETSCCSCSMGNGELHCPSIEPIANTSTSEPVIPSFEKNNHCVSRCNSQSCILAQEEEQYLQSGDQQLTRHVLLCLLLIIGLFANLSSCLWWLFNQEPGRLYVELQFFCAVFNFGQGFISFGIFGLDKHLIILPFKRRLEFLWNNKDTAENRDSPVSEEIKMTCQQFIHYHRDLCIRNIVKERRCGAKTSAGTFCGCDLVSWLIEVGLASDRGEAVIYGDRLVQGGVIQHITNEYEFRDEYLFYRFLQKSPEQSPPAINANTLQQERYKEIEHSSPPSHSPKT

SEQ ID NO: 5540 - protein, 870 aa, Homo sapiens; identical to SEQ ID NO: 5539

SEQ ID NO: 5541 - protein, 94 aa, Homo sapiens
  MOD_RES 92: Xaa = Selenocysteine
MVYISNGQVLDSRSQSPWRLSLITDFFWGIAEFVVLFFKTLLQQDVKKRRSYGNSSDSRYDDGRGPPGNPPRRMGRINHLRGPSPPPMAGGXGR

SEQ ID NO: 5542 - protein, 418 aa, Homo sapiens
MGEEGTGGTVHLLCLAASSGVPLFCRSSRGGAPARQQLPFSVIGSLNGVHMFGQNLEVQLSSARTENTTVVWKSFHDSITLIVLSSEVGISELRLERLLQMVFGAMVLLVGLEELTNIRNVERLKKDLRASYCLIDSFLGDSELIGDLTQCVDCVIPPEGSLLQEALSGFAEAAGTTFVSLVVSGRVVAATEGWWRLGTPEAVLLPWLVGSLPPQTARDYPVYLPHGSPTVPHRLLTLTLLPSLELCLLCGPSPPLSQLYPQLLERWWQPLLDPLRACLPLGPRALPSGFPLHTDILGLLLLHLELKRCLFTVEPLGDKEPSPEQRRRLLRNFYTLVTSTHFPPEPGPPEKTEDEVYQAQLPRACYLVLGTEEPGTGVRLVALQLGLRRLLLLLSPQSPTHGLRSLATHTLHALTPLL

SEQ ID NO: 5543 - protein, 237 aa, Homo sapiens
MDWLMGKSKAKPNGKKPAAEERKAYLEPEHTKARITDFQFKELVVLPREIDLNEWLASNTTTFFHHINLQYSTISEFCTGETCQTMAVCNTQYYWYDERGKKVKCTAPQYVDFVMSSVQKLVTDEDVFPTKYGREFPSSFESLVRKICRHLFHVLAHIYWAHFKETLALELHGHLNTLYVHFILFAREFNLLDPKETAIMDDLTEVLCSGAGGVHSGGSGDGAGSGGPGAQNHVKER

SEQ ID NO: 5544 - protein, 1380 aa, Homo sapiens
MASGRDERPPWRLGRLLLLMCLLLLGSSARAAHIKKAEATTTTTSAGAEAAEGQFDRYYHEEELESALREAAAAGLPGLARLFSIGRSVEGRPLWVLRLTAGLGSLIPEGDAGPDAAGPDAAGPLLPGRPQVKLVGNMHGDETVSRQVLIYLARELAAGYRRGDPRLVRLLNTTDVYLLPSLNPDGFERAREGDCGFGDGGPSGASGRDNSRGRDLNRSFPDQFSTGEPPALDEVPEVRALIEWIRRNKFVLSGNLHGGSVVASYPFDDSPEHKATGIYSKTSDDEVFKYLAKAYASNHPIMKTGEPHCPGDEDETFKDGITNGAHWYDVEGGMQDYNYVWANCFEITLELSCCKYPPASQLRQEWENNRESLITLIEKVHIGVKGFVKDSITGSGLENATISVAGINHNITTGRFGDFYRLLVPGTYNLTVVLTGYMPLTVTNVVVKEGPATEVDFSLRPTVTSVIPDTTEAVSTASTVAIPNILSGTSSSYQPIQPKDFHHHHFPDMEIFLRRFANEYPNITRLYSLGKSVESRELYVMEISDNPGVHEPGEPEFKYIGNMHGNEVVGRELLLNLIEYLCKNFGTDPEVTDLVHNTRIHLMPSMNPDGYEKSQEGDSISVIGRNNSNNFDLNRNFPDQFVQITDPTQPETIAVMSWMKSYPFVLSANLHGGSLVVNYPFDDDEQGLATYSKSPDDAVFQQIALSYSKENSQMFQGRPCKNMYPNEYFPHGITNGASWYNVPGGMQDWNYLQTNCFEVTIELGCVKYPLEKELPNFWEQNRRSLIQFMKQVHQGVRGFVLDATDGRGILNATISVAEINHPVTTYKTGDYWRLLVPGTYKITASARGYNPVTKNVTVKSEGAIQVNFTLVRSSTDSNNESKKGKGASSSTNDASDPTTKEFETLIKDLSAENGLESLMLRSSSNLALALYRYHSYKDLSEFLRGLVMNYPHITNLTNLGQSTEYRHIWSLEISNKPNVSEPEEPKIRFVAGIHGNAPVGTELLLALAEFLCLNYKKNPAVTQLVDRTRIVIVPSLNPDGRERAQEKDCTSKIGQTNARGKDLDTDFTNNASQPETKAIIENLIQKQDFSLSVALDGGSMLVTYPYDKPVQTVENKETLKHLASLYANNHPSMHMGQPSCPNKSDENIPGGVMRGAEWHSHLGSMKDYSVTYGHCPEITVYTSCCYFPSAARLPSLWADNKRSLLSMLVEVHKGVHGFVKDKTGKPISKAVIVLNEGIKVQTKEGGYFHVLLAPGVHNIIAIADGYQQQHSQVFVHHDAASSVVIVFDTDNRIFGLPRELVVTVSGATMSALILTACIIWCICSIKSNRHKDGFHRLRQHHDEYEDEIRMMSTGSKKSLLSHEFQDETDTEEETLYSSKH

SEQ ID NO: 5545 - protein, 827 aa, Homo sapiens
MCNQGRGRESSRGGLHVQGSCRGLSRSPQQETGFAKAPAGTDCFFHCSPGSRGQGDRKEEVTSEPGGTSIMSRLGGMNAAVRAVTRMGIYVGAKVFLIYEGYEGLVEGGENIKQANWLSVSNIIQLGGTIIGSARCKAFTTREGRRAAAYNLVQHGITNLCVIGGDGSLTGANIFRSEWGSLLEELVAEGKISETTARTYSHLNIAGLVGSIDNDFCGTDMTIGTDSALHRIMEVIDAITTTAQSHQRTFVLEVMGRHCGYLALVSALASGADWLFIPEAPPEDGWENFMCERLGETRSRGSRLNIIIIAEGAIDRNGKPISSSYVKDLVVQRLGFDTRVTVLGHVQRGGTPSAFDRILSSKMGMEAVMALLEATPDTPACVVTLSGNQSVRLPLMECVQMTKEVQKAMDDKRFDEATQLRGGSFENNWNIYKLLAHQKPPKEKSNFSLAILNVGAPAAGMNAAVRSAVRTGISHGHTVYVVHDGFEGLAKGQVQEVGWHDVAGWLGRGGSMLGTKRTLPKGQLESIVENIRIYGIHALLVVGGFEAYEGVLQLVEARGRYEELCIVMCVIPATISNNVPGTDFSLGSDTAVNAAMESCDRIKQSASGTKRRVFIVETMGGYCGYLATVTGIAVGADAAYVFEDPFNIHDLKVNVEHMTEKMKTDIQRGLVLRNEKCHDYYTTEFLYNLYSSEGKGVFDCRTNVLGHLQQGGAPTPFDRNYGTKLGVKAMLWLSEKLREVYRKGRVFANAPDSACVIGLKKKAVAFSPVTELKKDTDFEHRMPREQWWLSLRLMLKMLAQYRISMAAYVSGELEHVTRRTLSMDKGF

SEQ ID NO: 5546 - protein, 780 aa, Homo sapiens
MAAVDLEKLRASGAGKAIGVLTSGGDAQGMNAAVRAVTRMGIYVGAKVFLIYEGYEGLVEGGENIKQANWLSVSNIIQLGGTIIGSARCKAFTTREGRRAAAYNLVQHGITNLCVIGGDGSLTGANIFRSEWGSLLEELVAEGKISETTARTYSHLNIAGLVGSIDNDFCGTDMTIGTDSALHRIMEVIDAITTTAQSHQRTFVLEVMGRHCGYLALVSALASGADWLFIPEAPPEDGWENFMCERLGETRSRGSRLNIIIIAEGAIDRNGKPISSSYVKDLVVQRLGFDTRVTVLGHVQRGGTPSAFDRILSSKMGMEAVMALLEATPDTPACVVTLSGNQSVRLPLMECVQMTKEVQKAMDDKRFDEATQLRGGSFENNWNIYKLLAHQKPPKEKSNFSLAILNVGAPAAGMNAAVRSAVRTGISHGHTVYVVHDGFEGLAKGQVQEVGWHDVAGWLGRGGSMLGTKRTLPKGQLESIVENIRIYGIHALLVVGGFEAYEGVLQLVEARGRYEELCIVMCVIPATISNNVPGTDFSLGSDTAVNAAMESCDRIKQSASGTKRRVFIVETMGGYCGYLATVTGIAVGADAAYVFEDPFNIHDLKVNVEHMTEKMKTDIQRGLVLRNEKCHDYYTTEFLYNLYSSEGKGVFDCRTNVLGHLQQGGAPTPFDRNYGTKLGVKAMLWLSEKLREVYRKGRVFANAPDSACVIGLKKKAVAFSPVTELKKDTDFEHRMPREQWWLSLRLMLKMLAQYRISMAAYVSGELEHVTRRTLSMDKGF

SEQ ID NO: 5547 - protein, 147 aa, Homo sapiens
MALKRINKELSDLARDPPAQCSAGPVGDDMFHWQATIMGPNDSPYQGGVFFLTIHFPTDYPFKPPKVAFTTRIYHPNINSNGSICLDILRSQWSPALTISKVLLSICSLLCDPNPDDPLVPEIARIYKTDRDKYNRISREWTQKYAM

SEQ ID NO: 5548 - protein, 147 aa, Homo sapiens; identical to SEQ ID NO: 5547

SEQ ID NO: 5549 - protein, 147 aa, Homo sapiens; identical to SEQ ID NO: 5547

SEQ ID NO: 5550 - protein, 147 aa, Homo sapiens; identical to SEQ ID NO: 5547

SEQ ID NO: 5551 - protein, 147 aa, Homo sapiens; identical to SEQ ID NO: 5547

SEQ ID NO: 5552 - protein, 147 aa, Homo sapiens; identical to SEQ ID NO: 5547

SEQ ID NO: 5553 - protein, 147 aa, Homo sapiens; identical to SEQ ID NO: 5547

SEQ ID NO: 5554 - protein, 148 aa, Homo sapiens
MALKRINKELSDLARDPPAQCSAGPVGDDMFHWQATIMGPNDSPYQGGVFFLTIHFPTDYPFKPPKVAFTTRIYHPNINSNGSICLDILRSQWSPALTISKVLLSICSLLCDPNPDDPLVPEIARIYKTDRDKYNRLAREWTEKYAML

SEQ ID NO: 5555 - protein, 149 aa, Homo sapiens
MLSNRKCLSKELSDLARDPPAQCSAGPVGDDMFHWQATIMGPNDSPYQGGVFFLTIHFPTDYPFKPPKVAFTTRIYHPNINSNGSICLDILRSQWSPALTISKVLLSICSLLCDPNPDDPLVPEIARIYKTDRDKYNRISREWTQKYAM

SEQ ID NO: 5556 - protein, 535 aa, Homo sapiens
MAALLAAAAVRARILQVSSKVKSSPTWYSASSFSSSVPTVKLFIGGKFVESKSDKWIDIHNPATNEVIGRVPQATKAEMDAAIASCKRAFPAWADTSVLSRQQVLLRYQQLIKENLKEIAKLITLEQGKTLADAEGDVFRGLQVVEHACSVTSLMMGETMPSITKDMDLYSYRLPLGVCAGIAPFNFPAMIPLWMFPMAMVCGNTFLMKPSERVPGATMLLAKLLQDSGAPDGTLNIIHGQHEAVNFICDHPDIKAISFVGSNKAGEYIFERGSRHGKRVQANMGAKNHGVVMPDANKENTLNQLVGAAFGAAGQRCMALSTAVLVGEAKKWLPELVEHAKNLRVNAGDQPGADLGPLITPQAKERVCNLIDSGTKEGASILLDGRKIKVKGYENGNFVGPTIISNVKPNMTCYKEEIFGPVLVVLETETLDEAIQIVNNNPYGNGTAIFTTNGATARKYAHLVDVGQVGVNVPIPVPLPMFSFTGSRSSFRGDTNFYGKQGIQFYTQLKTITSQWKEEDATLSSPAVVMPTMGR

SEQ ID NO: 5557 - protein, 651 aa, Homo sapiens
MLRLQMTDGHISCTAVEFSYMSKISLNTPPGTKVKLSGIVDIKNGFLLLNDSNTTVLGGEVEHLIEKWELQRSLSKHNRSNIGTEGGPPPFVPFGQKCVSHVQVDSRELDRRKTLQVTMPVKPTNDNDEFEKQRTAAIAEVAKSKETKTFGGGGGGARSNLNMNAAGNRNREVLQKEKSTKSEGKHEGVYRELVDEKALKHITEMGFSKEASRQALMDNGNNLEAALNVLLTSNKQKPVMGPPLRGRGKGRGRIRSEDEEDLGNARPSAPSTLFDFLESKMGTLNVEEPKSQPQQLHQGQYRSSNTEQNGVKDNNHLRHPPRNDTRQPRNEKPPRFQRDSQNSKSVLEGSGLPRNRGSERPSTSSVSEVWAEDRIKCDRPYSRYDRTKDTSYPLGSQHSDGAFKKRDNSMQSRSGKGPSFAEAKENPLPQGSVDYNNQKRGKRESQTSIPDYFYDRKSQTINNEAFSGIKIEKHFNVNTDYQNPVRSNSFIGVPNGEVEMPLKGRRIGPIKPAGPVTAVPCDDKIFYNSGPKRRSGPIKPEKILESSIPMEYAKMWKPGDECFALYWEDNKFYRAEVEALHSSGMTAVVKFIDYGNYEEVLLSNIKPIQTEAWEEEGTYDQTLEFRRGGDGQPRRSTRPTQQFYQPPRARN

SEQ ID NO: 5558 - protein, 86 aa, Homo sapiens
MSLPLNPKPFLNGLTGKPVMVKLKWGMEYKGYLVSVDGYMNMQLANTEEYIDGALSGHLGEVLIRCNNVLYIRGVEEEEEDGEMRE

SEQ ID NO: 5559 - protein, 55 aa, Homo sapiens
MVKLSKEAKQRLQQLFKGSQFAIRWGFIPLVIYLGFKRGADPGMPEPTVLSLLWG

SEQ ID NO: 5560 - protein, 237 aa, Homo sapiens
MPVKKKRKSPGVAAAVAEDGGLKKCKISSYCRSQPPARLISGEEHFSSKKCLAWFYEYAGPDEVVGPEGMEKFCEDIGVEPENIIMLVLAWKLEAESMGFFTKEEWLKGMTSLQCDCTEKLQNKFDFLRSQLNDISSFKNIYRYAFDFARDKDQRSLDIDTAKSMLALLLGRTWPLFSVFYQYLEQSKYRVMNKDQWYNVLEFSRTVHADLSNYDEDGAWPVLLDEFVEWQKVRQTS

SEQ ID NO: 5561 - protein, 438 aa, Homo sapiens
MLLCPAQKTVFRLQLTTAAQCLWVYLRDKQVVVFLAYPTRAPGRNNGVTSLHWPDPTLSLSWTQEAYTEYLRSIHYISQVLLEEVETTKEAGETVPPDTSKMLKLAQQCLERAQSTAAKLGKTRLKPTMPAAAPIPQPAGRHRRVYSDEGGKLSPFLPPEIFQKLQGAESQSCKKELTPLEEASLQNQKLKAAYEARMARLDPSQAMQKTSLTLSLQRQMMENLVIAKAREETLQRKMEERRLRLQEAANRRFCSKFALTPEEREQRALYAAILEYEQDHDWPKHWKAKLKRNPGDLSLVTSLVSHLLSLPDHPIAQLLRRLQCSVYSALYPAVSRAAAPAPGCCPPTPNPGSRRLRPSQSLHCMLSPPEPSAAPRPQDSPPTPPLQPGPWGLPHPWGTPHLDCQTRTARSRTWSSSWGRLSRRAGAVGYSRSPSCSS

SEQ ID NO: 5562 - protein, 225 aa, Homo sapiens
MAGTGLVAGEVVVDALPYFDQGYEAPGVREAAAALVEEETRRYRPTKNYLSYLTAPDYSAFETDIMRNEFERLAARQPIELLSMKRYELPAPSSGQKNDITAWQECVNNSMAQLEHQAVRIENLELMSQHGCNAWKVYNENLVHMIEHAQKELQKLRKHIQDLNWQRKNMQLTAGSKLREMESNWVSLVSKNYEIERTIVQLENEIYQIKQQHGEANKENIRQDF

SEQ ID NO: 5563 - protein, 143 aa, Homo sapiens
MSFSPYSTMITVCVCFNSRVQLTVPSFTAWLRSRYSKALFMVLRRAAQEKDKGVCQGWHCVKKWACKGRIPGQPLQPQPLGPYLRSLSQHPATQTPRPQARASSRYLELHRSQNRGGSEFKFWFCYCLIACCRDSISSSGKWE

SEQ ID NO: 5564 - protein, 136 aa, Homo sapiens
MARTKQTARKSTGGKAPRKQLATKAARKSAPSTGGVKKPHRYRPGTVALREIRRYQKSTELLIRKLPFQRLVREIAQDFKTDLRFQSAAIGALQEASEAYLVGLFEDTNLCAIHAKRVTIMPKDIQLARRIRGERA

SEQ ID NO: 5565 - protein, 307 aa, Homo sapiens
MAALAPLPPLPAQFKSIQHHLRTAQEHDKRDPVVAYYCRLYAMQTGMKIDSKTPECRKFLSKLMDQLEALKKQLGDNEAITQEIVGCAHLENYALKMFLYADNEDRAGRFHKNMIKSFYTASLLIDVITVFGELTDENVKHRKYARWKATYIHNCLKNGETPQAGPVGIEEDNDIEENEDAGAASLPTQPTQPSSSSTYDPSNMPSGNYTGIQIPPGAHAPANTPAEVPHSTGVASNTIQPTPQTIPAIDPALFNTISQGDVRLTPEDFARAQKYCKYAGSALQYEDVSTAVQNLQKALKLLTTGRE

SEQ ID NO: 5566 - protein, 442 aa, Homo sapiens
MAGAATGSRTPGRSELVEGCGWRCPEHGDRVAELFCRRCRRCVCALCPVLGAHRGHPVGLALEAAVHVQKLSQECLKQLAIKKQQHIDNITQIEDATEKLKANAESSKTWLKGKFTELRLLLDEEEALAKKFIDKNTQLTLQVYREQADSCREQLDIMNDLSNRVWSISQEPDPVQRLQAYTATEQEMQQQMSLGELCHPVPLSFEPVKSFFKGLVEAVESTLQTPLDIRLKESINCQLSDPSSTKPGTLLKTSPSPERSLLLKYARTPTLDPDTMHARLRLSADRLTVRCGLLGSLGPVPVLRFDALWQVLARDCFATGRHYWEVDVQEAGAGWWVGAAYASLRRRGASAAARLGCNRQSWCLKRYDLEYWAFHDGQRSRLRPRDDLDRLGVFLDYEAGVLAFYDVTGGMSHLHTFRATFQEPLYPALRLWEGAISIPRLP

SEQ ID NO: 5567 - protein, 442 aa, Homo sapiens; identical to SEQ ID NO: 5566

SEQ ID NO: 5568 - protein, 442 aa, Homo sapiens; identical to SEQ ID NO: 5566

SEQ ID NO: 5569 - protein, 253 aa, Homo sapiens
MAGAATGSRTPGRSELVEGCGWRCPEHGDRVAELFCRRCRRCVCALCPVLGAHRGHPVGLALEAAVHVQKLSQECLKQLAIKKQQHIDNITQIEDATEKLKANAESSKTWLKGKFTELRLLLDEEEALAKKFIDKNTQLTLQVYREQADSCREQLDIMNDLSNRVWSISQEPDPVQRLQAYTATEQEMQQQMSLGELCHPVPLSFEPVKSFFKGLVEAVESTLQTPLDIRLSPTNHAYSALKVSSPRLVSNRP

SEQ ID NO: 5570 - protein, 336 aa, Homo sapiens
MVTAFRSLPRGSSGAAASMSAHNRGTELDLSWISKIQVNHPAVLRRAEQIQARRTVKKEWQAAWLLKAVTFIDLTTLSGDDTSSNIQRLCYKAKYPIREDLLKALNMHDKGITTAAVCVYPARVCDAVKALKAAGCNIPVASVAAGFPAGQTHLKTRLEEIRLAVEDGATEIDVVINRSLVLTGQWEALYDEIRQFRKACGEAHLKTILATGELGTLTNVYKASMIAMMAGSDFIKTSTGKETVNATFPVAIVMLRAIRDFFWKTGNKIGFKPAGGIRSAKDSLAWLSLVKEELGDEWLKPELFRIGASTLLSDIERQIYHHVTGRYAAYHDLPMS

SEQ ID NO: 5571 - protein, 142 aa, Homo sapiens
MYSGNRSGGHGYWDGGGAAGAEGPAPAGTLSPAPLFSPGTYERLALLLGSIGLLGVGNNLLVLVLYYKFQRLRTPTHLLLVNISLSDLLVSLFGVTFTFVSCLRNGWVWDTVGCVWDGFSGSLFASLCGRSSDNSSDQDFKI

SEQ ID NO: 5572 - protein, 189 aa, Homo sapiens
MYSGNRSGGHGYWDGGGAAGAEGPAPAGTLSPAPLFSPGTYERLALLLGSIGLLGVGNNLLVLVLYYKFQRLRTPTHLLLVNISLSDLLVSLFGVTFTFVSCLRNGWVWDTVGCVWDGFSGSLFGIVSIATLTVLAYERYIRVVHARVINFSWAWRAITYIWLYSLAWAGAPLLGWNSFVVWKIFRQFK

SEQ ID NO: 5573 - protein, 402 aa, Homo sapiens
MYSGNRSGGHGYWDGGGAAGAEGPAPAGTLSPAPLFSPGTYERLALLLGSIGLLGVGNNLLVLVLYYKFQRLRTPTHLLLVNISLSDLLVSLFGVTFTFVSCLRNGWVWDTVGCVWDGFSGSLFGIVSIATLTVLAYERYIRVVHARVINFSWAWRAITYIWLYSLAWAGAPLLGWNRYILDVHGLGCTVDWKSKDANDSSFVLFLFLGCLVVPLGVIAHCYGHILYSIRMLRCVEDLQTIQVIKILKYEKKLAKMCFLMIFTFLVCWMPYIVICFLVVNGHGHLVTPTISIVSYLFAKSNTVYNPVIYVFMIRKFRRSLLQLLCLRLLRCQRPAKDLPAAGSEMQIRPIVMSQKDGDRPKKKVTFNSSSIIFIITSDESLSVDDSDKTNGSKVDVIQVRPL

SEQ ID NO: 5574 - protein, 1058 aa, Homo sapiens
MSSSPLSKKRRVSGPDPKPGSNCSPAQSVLSEVPSVPTNGMAKNGSEADIDEGLYSRQLYVLGHEAMKRLQTSSVLVSGLRGLGVEIAKNIILGGVKAVTLHDQGTAQWADLSSQFYLREEDIGKNRAEVSQPRLAELNSYVPVTAYTGPLVEDFLSGFQVVVLTNTPLEDQLRVGEFCHNRGIKLVVADTRGLFGQLFCDFGEEMILTDSNGEQPLSAMVSMVTKDNPGVVTCLDEARHGFESGDFVSFSEVQGMVELNGNQPMEIKVLGPYTFSICDTSNFSDYIRGGIVSQVKVPKKISFKSLVASLAEPDFVVTDFAKFSRPAQLHIGFQALHQFCAQHGRPPRPRNEEDAAELVALAQAVNARALPAVQQNNLDEDLIRKLAYVAAGDLAPINAFIGGLAAQEVMKACSGKFMPIMQWLYFDALECLPEDKEVLTEDKCLQRQNRYDGQVAVFGSDLQEKLGKQKYFLVGAGAIGCELLKNFAMIGLGCGEGGEIIVTDMDTIEKSNLNRQFLFRPWDVTKLKSDTAAAAVRQMNPHIRVTSHQNRVGPDTERIYDDDFFQNLDGVANALDNVDARMYMDRRCVYYRKPLLESGTLGTKGNVQVVIPFLTESYSSSQDPPEKSIPICTLKNFPNAIEHTLQWARDEFEGLFKQPAENVNQYLTDPKFVERTLRLAGTQPLEVLEAVQRSLVLQRPQTWADCVTWACHHWHTQYSNNIRQLLHNFPPDQLTSSGAPFWSGPKRCPHPLTFDVNNPLHLDYVMAAANLFAQTYGLTGSQDRAAVATFLQSVQVPEFTPKSGVKIHVSDQELQSANASVDDSRLEELKATLPSPDKLPGFKMYPIDFEKDDDSNFHMDFIVAASNLRAENYDIPSADRHKSKLIAGKIIPAIATTTAAVVGLVCLELYKVVQGHRQLDSYKNGFLNLALPFFGFSEPLAAPRHQYYNQEWTLWDRFEVQGLQPNGEEMTLKQFLDYFKTEHKLEITMLSQGVSMLYSFFMPAAKLKERLDQPMTEIVSRVSKRKLGRHVRALVLELCCNDESGEDVEVPYVRYTIR

SEQ ID NO: 5575 - protein, 1058 aa, Homo sapiens; identical to SEQ ID NO: 5574

SEQ ID NO: 5576 - protein, 85 aa, Homo sapiens
MEASSEPPLDAKSDVTNQLVDFQWKLGMAVSSDTCRSLKYPYVAVMLKVADHSGQVKTKCFEMTIPQFQNFYRQFKEIAAVIETV

SEQ ID NO: 5577 - protein, 98 aa, Homo sapiens
MEASSEPPLDAKSDVTNQLVDFQWKLGMAVSSDTCRSLKYPYVAVMLKVADHSGQVKTKCFEMTIPQFQPQLLATSSLLSASNFYRQFKEIAAVIETV

SEQ ID NO: 5578 - protein, 1560 aa, Homo sapiens
MEPGSDDFLPPPECPVFEPSWAEFRDPLGYIAKIRPIAEKSGICKIRPPADWQPPFAVEVDNFRFTPRIQRLNELEAQTRVKLNYLDQIAKFWEIQGSSLKIPNVERRILDLYSLSKIVVEEGGYEAICKDRRWARVAQRLNYPPGKNIGSLLRSHYERIVYPYEMYQSGANLVQCNTRPFDNEEKDKEYKPHSIPLRQSVQPSKFNSYGRRAKRLQPDPEPTEEDIEKNPELKKLQIYGAGPKMMGLGLMAKDKTLRKKDKEGPECPPTVVVKEELGGDVKVESTSPKTFLESKEELSHSPEPCTKMTMRLRRNHSNAQFIESYVCRMCSRGDEDDKLLLCDGCDDNYHIFCLLPPLPEIPKGVWRCPKCVMAECKRPPEAFGFEQATREYTLQSFGEMADSFKADYFNMPVHMVPTELVEKEFWRLVNSIEEDVTVEYGADIHSKEFGSGFPVSDSKRHLTPEEEEYATSGWNLNVMPVLEQSVLCHINADISGMKVPWLYVGMVFSAFCWHIEDHWSYSINYLHWGEPKTWYGVPSLAAEHLEEVMKKLTPELFDSQPDLLHQLVTLMNPNTLMSHGVPVVRTNQCAGEFVITFPRAYHSGFNQGYNFAEAVNFCTADWLPAGRQCIEHYRRLRRYCVFSHEELICKMAACPEKLDLNLAAAVHKEMFIMVQEERRLRKALLEKGITEAEREAFELLPDDERQCIKCKTTCFLSALACYDCPDGLVCLSHINDLCKCSSSRQYLRYRYTLDELPAMLHKLKVRAESFDTWANKVRVALEVEDGRKRSLEELRALESEARERRFPNSELLQQLKNCLSEAEACVSRALGLVSGQEAGPHRVAGLQMTLTELRAFLDQMNNLPCAMHQIGDVKGVLEQVEAYQAEAREALASLPSSPGLLQSLLERGRQLGVEVPEAQQLQRQVEQARWLDEVKRTLAPSARRGTLAVMRGLLVAGASVAPSPAVDKAQAELQELLTIAERWEEKAHLCLEARQKHPPATLEAIIREAENIPVHLPNIQALKEALAKARAWIADVDEIQNGDHYPCLDDLEGLVAVGRDLPVGLEELRQLELQVLTAHSWREKASKTFLKKNSCYTLLEVLCPCADAGSDSTKRSRWMEKELGLYKSDTELLGLSAQDLRDPGSVIVAFKEGEQKEKEGILQLRRTNSAKPSPLASSSTASSTTSICVCGQVLAGAGRLQCDLCQDWFHGRCVSVPRLLSSPRPNPTSSPLLAWWEWDTKFLCPLCMRSRRPRLETILALLVALQRLPVRLPEGEALQCLTERAISWQGRARQALASEDVTALLGRLAELRQRLQAEPRPEEPPNYPAAPASDPLREGSGKDMPKVQGLLENGDSVTSPEKVAPEEGSGKRDLELLSSLLPQLTGPVLELPEATRAPLEELMMEGDLLEVTLDENHSIWQLLQAGQPPDLERIRTLLELEKAERHGSRARGRALERRRRRKVDRGGEGDDPAREELEPKRVRSSGPEAEEVQEEEELEEETGGEGPPAPIPTTGSPSTQENQNGLEPAEGTTSGPSAPFSTLTPRLHLPCPQQPPQQQL

SEQ ID NO: 5579 - protein, 165 aa, Homo sapiens
MTLEEFSAGEQKTERMDKVGDALEEVLSKALSQRTITVGVYEAAKLLNVDPDNVVLCLLAADEDDDRDVALQIHFTLIQAFCCENDINILRVSNPGRLAELLLLETDAGPAASEGAEQPPDLHCVLVTNPHSSQWKDPALSQLICFCRESRYMDQWVPVINLPER

SEQ ID NO: 5580 - protein, 335 aa, Homo sapiens
MLGIWTLLPLVLTSVARLSSKSVNAQVTDINSKGLELRKTVTTVETQNLEGLHHDGQFCHKPCPPGERKARDCTVNGDEPDCVPCQEGKEYTDKAHFSSKCRRCRLCDEGHGLEVEINCTRTQNTKCRCKPNFFCNSTVCEHCDPCTKCEHGIIKECTLTSNTKCKEEGSRSNLGWLCLLLLPIPLIVWVKRKEVQKTCRKHRKENQGSHESPTLNPETVAINLSDVDLSKYITTIAGVMTLSQVKGFVRKNGVNEAKIDEIKNDNVQDTAEQKVQLLRNWHQLHGKKEAYDTLIKDLKKANLCTLAEKIQTIILKDITSDSENSNFRNEIQSLV

SEQ ID NO: 5581 - protein, 314 aa, Homo sapiens
MLGIWTLLPLVLTSVARLSSKSVNAQVTDINSKGLELRKTVTTVETQNLEGLHHDGQFCHKPCPPGERKARDCTVNGDEPDCVPCQEGKEYTDKAHFSSKCRRCRLCDEGHGLEVEINCTRTQNTKCRCKPNFFCNSTVCEHCDPCTKCEHGIIKECTLTSNTKCKEEVKRKEVQKTCRKHRKENQGSHESPTLNPETVAINLSDVDLSKYITTIAGVMTLSQVKGFVRKNGVNEAKIDEIKNDNVQDTAEQKVQLLRNWHQLHGKKEAYDTLIKDLKKANLCTLAEKIQTIILKDITSDSENSNFRNEIQSLV

SEQ ID NO: 5582 - protein, 220 aa, Homo sapiens
MLGIWTLLPLVLTSVARLSSKSVNAQVTDINSKGLELRKTVTTVETQNLEGLHHDGQFCHKPCPPGERKARDCTVNGDEPDCVPCQEGKEYTDKAHFSSKCRRCRLCDEGHGLEVEINCTRTQNTKCRCKPNFFCNSTVCEHCDPCTKCEHGIIKECTLTSNTKCKEEGSRSNLGWLCLLLLPIPLIVWVKRKEVQKTCRKHRKENQGSHESPTLNPMLT

SEQ ID NO: 5583 - protein, 149 aa, Homo sapiens
MLGIWTLLPLVLTSVARLSSKSVNAQVTDINSKGLELRKTVTTVETQNLEGLHHDGQFCHKPCPPGERKARDCTVNGDEPDCVPCQEGKEYTDKAHFSSKCRRCRLCDEGHDVNMESSRNAHSPATPSAKRKDPDLTWGGFVFFFCQFH

SEQ ID NO: 5584 - protein, 149 aa, Homo sapiens; identical to SEQ ID NO: 5583

SEQ ID NO: 5585 - protein, 132 aa, Homo sapiens
MLGIWTLLPLVLTSVARLSSKSVNAQVTDINSKGLELRKTVTTVETQNLEGLHHDGQFCHKPCPPGERKARDCTVNGDEPDCVPCQEGKEYTDKAHFSSKCRRCRLCDEGHDVNMESSRNAHSPATPSAKRK

SEQ ID NO: 5586 - protein, 86 aa, Homo sapiens
MLGIWTLLPLVLTSVARLSSKSVNAQVTDINSKGLELRKTVTTVETQNLEGLHHDGQFCHKPCPPDVNMESSRNAHSPATPSAKRK

SEQ ID NO: 5587 - protein, 103 aa, Homo sapiens
MLGIWTLLPLVLTSVARLSSKSVNAQVTDINSKGLELRKTVTTVETQNLEGLHHDGQFCHKPCPPDVNMESSRNAHSPATPSAKRKDPDLTWGGFVFFFCQFH

SEQ ID NO: 5588 - protein, 293 aa, Homo sapiens
MGSRAELCTLLGGFSFLLLLIPGEGAKGGSLRESQGVCSKQTLVVPLHYNESYSQPVYKPYLTLCAGRRICSTYRTMYRVMWREVRREVQQTHAVCCQGWKKRHPGALTCEAICAKPCLNGGVCVRPDQCECAPGWGGKHCHVDVDECRTSITLCSHHCFNTAGSFTCGCPHDLVLGVDGRTCMEGSPEPPTSASILSVAVREAEKDERALKQEIHELRGRLERLEQWAGQAGAWVRAVLPVPPEELQPEQVAELWGRGDRIESLSDQVLLLEERLGACSCEDNSLGLGVNHR

SEQ ID NO: 5589 - protein, 1022 aa, Homo sapiens
MPDFQPGDTTVRLDKRMSLTAIYDKRRETDYSDKGYNLAFVSQDEQENSSFTILYEEPLQEEDKYASAEARQTQSVLFHDTSADSMPVLACERSESRTDLVHHFEKGTKLGETFDSDSSEMFLSVEAKRYKIYPLALSPIYEDDSSQEDILSSEVSPGHHGPRKSRDSENQSSSVLSLLQSVSERLKMNFDEDDREAADEEEEEEEAAVLHKGDLRAGSGERVTFQLPDPSITFYPDDQESVGISKNSYVMPNEPTTSNLQVGLWPEKTSFLQKSDLTSKLHSSLKSAYHQYLQTSQSHSSEKGARFGGIFQEPVSKYFRVQDSPGRLSPFIENVDKQTLRCNPRPGKMVIYDLHESTYKQEVYCNIPDATSWSFPNGVLIKVVRGCWILYEKPHFRGQKCVLEEGEKVLNRDWILQNRRHPQRNFILGSLKRVLKDCSIPEIELFPQSDPACCPVYIQRAVPNLEELNISKSVSFTVKSGVWLAYPDINFKGQATVLEEDHGLFEISTAEMKSLHPLQMGGLKVEMPMNLKVIIYEKPHFHGQAKEFSEHIDSVPNFLKNNGDFHRIGSIRVIGGVWVAYEKEHFKGQQFLLEEGDFEDSNACGALSSPILSFRYLQANFIESSVTLFESDLESGKFIDITNQEISDLEEIGFGSKTRSIHVKSGVWVAYQQKFFCGEQYILEKGKYKCFFDWGGSNNIIMSIRPIQLEPLGINEPPHLLKAFSKPGFQGECIDFTEETSDLTSLMPCSFKVLRGCWLLYYQEDMFVNHCVLEEGLYADLTSCGCPASKVKSLKPIDYVFEEPSISLFALEHCEGRELHLEEAVNSVLNKDLHFYTQSVWVKSGLWIAYEGSNFLGRQILLRPNEIPNWTAFSRWKTIGSLRPMKQPAVYIRIKNRAQGEYLTVTGSLADTRATSVCISPYSGKNTQIWYYCRGLFKSKASDTCLDVIGGRDTPGAKVALWTEHGQFRQKWRLNKNGTISSYLSDQLVLDVKGGNYCDKTHVIVNQPLEGEETQKWDIEIL

SEQ ID NO: 5590 - protein, 1239 aa, Homo sapiens
MSRLLWRKVAGATVGPGPVPAPGRWVSSSVPASDPSDGQRRRQQQQQQQQQQQQQPQQPQVLSSEGGQLRHNPLDIQMLSRGLHEQIFGQGGEMPGEAAVRRSVEHLQKHGLWGQPAVPLPDVELRLPPLYGDNLDQHFRLLAQKQSLPYLEAANLLLQAQLPPKPPAWAWAEGWTRYGPEGEAVPVAIPEERALVFDVEVCLAEGTCPTLAVAISPSAWYSWCSQRLVEERYSWTSQLSPADLIPLEVPTGASSPTQRDWQEQLVVGHNVSFDRAHIREQYLIQGSRMRFLDTMSMHMAISGLSSFQRSLWIAAKQGKHKVQPPTKQGQKSQRKARRGPAISSWDWLDISSVNSLAEVHRLYVGGPPLEKEPRELFVKGTMKDIRENFQDLMQYCAQDVWATHEVFQQQLPLFLERCPHPVTLAGMLEMGVSYLPVNQNWERYLAEAQGTYEELQREMKKSLMDLANDACQLLSGERYKEDPWLWDLEWDLQEFKQKKAKKVKKEPATASKLPIEGAGAPGDPMDQEDLGPCSEEEEFQQDVMARACLQKLKGTTELLPKRPQHLPGHPGWYRKLCPRLDDPAWTPGPSLLSLQMRVTPKLMALTWDGFPLHYSERHGWGYLVPGRRDNLAKLPTGTTLESAGVVCPYRAIESLYRKHCLEQGKQQLMPQEAGLAEEFLLTDNSAIWQTVEELDYLEVEAEAKMENLRAAVPGQPLALTARGGPKDTQPSYHHGNGPYNDVDIPGCWFFKLPHKDGNSCNVGSPFAKDFLPKMEDGTLQAGPGGASGPRALEINKMISFWRNAHKRISSQMVVWLPRSALPRAVIRHPDYDEEGLYGAILPQVVTAGTITRRAVEPTWLTASNARPDRVGSELKAMVQAPPGYTLVGADVDSQELWIAAVLGDAHFAGMHGCTAFGWMTLQGRKSRGTDLHSKTATTVGISREHAKIFNYGRIYGAGQPFAERLLMQFNHRLTQQEAAEKAQQMYAATKGLRWYRLSDEGEWLVRELNLPVDRTEGGWISLQDLRKVQRETARKSQWKKWEVVAERAWKGGTESEMFNKLESIATSDIPRTPVLGCCISRALEPSAVQEEFMTSRVNWVVQSSAVDYLHLMLVAMKWLFEEFAIDGRFCISIHDEVRYLVREEDRYRAALALQITNLLTRCMFAYKLGLNDLPQSVAFFSAVDIDRCLRKEVTMDCKTPSNPTGMERRYGIPQGEALDIYQIIELTKGSLEKRSQPGP

SEQ ID NO: 5591 - protein, 2225 aa, Homo sapiens
MAALVLEDGSVLRGQPFGAAVSTAGEVVFQTGMVGYPEALTDPSYKAQILVLTYPLIGNYGIPPDEMDEFGLCKWFESSGIHVAALVVGECCPTPSHWSATRTLHEWLQQHGIPGLQGVDTRELTKKLREQGSLLGKLVQNGTEPSSLPFLDPNARPLVPEVSIKTPRVFNTGGAPRILALDCGLKYNQIRCLCQRGAEVTVVPWDHALDSQEYEGLFLSNGPGDPASYPSVVSTLSRVLSEPNPRPVFGICLGHQLLALAIGAKTYKMRYGNRGHNQPCLLVGSGRCFLTSQNHGFAVETDSLPADWAPLFTNANDGSNEGIVHNSLPFFSVQFHPEHQAGPSDMELLFDIFLETVKEATAGNPGGQTVRERLTERLCPPGIPTPGSGLPPPRKVLILGSGGLSIGQAGEFDYSGSQAIKALKEENIQTLLINPNIATVQTSQGLADKVYFLPITPHYVTQVIRNERPDGVLLTFGGQTALNCGVELTKAGVLARYGVRVLGTPVETIELTEDRRAFAARMAEIGEHVAPSEAANSLEQAQAAAERLGYPVLVRAAFALGGLGSGFASNREELSALVAPAFAHTSQVLVDKSLKGWKEIEYEVVRDAYGNCVTVCNMENLDPLGIHTGESIVVAPSQTLNDREYQLLRQTAIKVTQHLGIVGECNVQYALNPESEQYYIIEVNARLSRSSALASKATGYPLAYVAAKLALGIPLPELRNSVTGGTAAFEPSVDYCVVKIPRWDLSKFLRVSTKIGSCMKSVGEVMGIGRSFEEAFQKALRMVDENCVGFDHTVKPVSDMELETPTDKRIFVVAAALWAGYSVDRLYELTRIDRWFLHRMKRIIAHAQLLEQHRGQPLPPDLLQQAKCLGFSDKQIALAVLSTELAVRKLRQELGICPAVKQIDTVAAEWPAQTNYLYLTYWGTTHDLTFRTPHVLVLGSGVYRIGSSVEFDWCAVGCIQQLRKMGYKTIMVNYNPETVSTDYDMCDRLYFDEISFEVVMDIYELENPEGVILSMGGQLPNNMAMALHRQQCRVLGTSPEAIDSAENRFKFSRLLDTIGISQPQWRELSDLESARQFCQTVGYPCVVRPSYVLSGAAMNVAYTDGDLERFLSSAAAVSKEHPVVISKFIQEAKEIDVDAVASDGVVAAIAISEHVENAGVHSGDATLVTPPQDITAKTLERIKAIVHAVGQELQVTGPFNLQLIAKDDQLKVIECNVRVSRSFPFVSKTLGVDLVALATRVIMGEEVEPVGLMTGSGVVGVKVPQFSFSRLAGADVVLGVEMTSTGEVAGFGESRCEAYLKAMLSTGFKIPKKNILLTIGSYKNKSELLPTVRLLESLGYSLYASLGTADFYTEHGVKVTAVDWHFEEAVDGECPPQRSILEQLAEKNFELVINLSMRGAGGRRLSSFVTKGYRTRRLAADFSVPLIIDIKCTKLFVEALGQIGPAPPLKVHVDCMTSQKLVRLPGLIDVHVHLREPGGTHKEDFASGTAAALAGGITMVCAMPNTRPPIIDAPALALAQKLAEAGARCDFALFLGASSENAGTLGTVAGSAAGLKLYLNETFSELRLDSVVQWMEHFETWPSHLPIVAHAEQQTVAAVLMVAQLTQRSVHICHVARKEEILLIKAAKARGLPVTCEVAPHHLFLSHDDLERLGPGKGEVRPELGSRQDVEALWENMAVIDCFASDHAPHTLEEKCGSRPPPGFPGLETMLPLLLTAVSEGRLSLDDLLQRLHHNPRRIFHLPPQEDTYVEVDLEHEWTIPSHMPFSKAHWTPFEGQKVKGTVRRVVLRGEVAYIDGQVLVPPGYGQDVRKWPQGAVPQLPPSAPATSEMTTTPERPRRGIPGLPDGRFHLPPRIHRASDPGLPAEEPKEKSSRKVAEPELMGTPDGTCYPPPPVPRQASPQNLGTPGLLHPQTSPLLHSLVGQHILSVQQFTKDQMSHLFNVAHTLRMMVQKERSLDILKGKVMASMFYEVSTRTSSSFAAAMARLGGAVLSFSEATSSVQKGESLADSVQTMSCYADVVVLRHPQPGAVELAAKHCRRPVINAGDGVGEHPTQALLDIFTIREELGTVNGMTITMVGDLKHGRTVHSLACLLTQYRVSLRYVAPPSLRMPPTVRAFVASRGTKQEEFESIEEALPDTDVLYMTRIQKERFGSTQEYEACFGQFILTPHIMTRAKKKMVVMHPMPRVNEISVEVDSDPRAAYFRQAENGMYIRMALLATVLGRF

SEQ ID NO: 5592 - protein, 1360 aa, Homo sapiens
MASDSPARSLDEIDLSALRDPAGIFELVELVGNGTYGQVYKGRHVKTGQLAAIKVMDVTGDEEEEIKQEINMLKKYSHHRNIATYYGAFIKKNPPGMDDQLWLVMEFCGAGSVTDLIKNTKGNTLKEEWIAYICREILRGLSHLHQHKVIHRDIKGQNVLLTENAEVKLVDFGVSAQLDRTVGRRNTFIGTPYWMAPEVIACDENPDATYDFKSDLWSLGITAIEMAEGAPPLCDMHPMRALFLIPRNPAPRLKSKKWSKKFQSFIESCLVKNHSQRPATEQLMKHPFIRDQPNERQVRIQLKDHIDRTKKKRGEKDETEYEYSGSEEEEEENDSGEPSSILNLPGESTLRRDFLRLQLANKERSEALRRQQLEQQQRENEEHKRQLLAERQKRIEEQKEQRRRLEEQQRREKELRKQQEREQRRHYEEQMRREEERRRAEHEQEYIRRQLEEEQRQLEILQQQLLHEQALLLEYKRKQLEEQRQAERLQRQLKQERDYLVSLQHQRQEQRPVEKKPLYHYKEGMSPSEKPAWAKEVEERSRLNRQSSPAMPHKVANRISDPNLPPRSESFSISGVQPARTPPMLRPVDPQIPHLVAVKSQGPALTASQSVHEQPTKGLSGFQEALNVTSHRVEMPRQNSDPTSENPPLPTRIEKFDRSSWLRQEEDIPPKVPQRTTSISPALARKNSPGNGSALGPRLGSQPIRASNPDLRRTEPILESPLQRTSSGSSSSSSTPSSQPSSQGGSQPGSQAGSSERTRVRANSKSEGSPVLPHEPAKVKPEESRDITRPSRPASYKKAIDEDLTALAKELRELRIEETNRPMKKVTDYSSSSEESESSEEEEEDGESETHDGTVAVSDIPRLIPTGAPGSNEQYNVGMVGTHGLETSHADSFSGSISREGTLMIRETSGEKKRSGHSDSNGFAGHINLPDLVQQSHSPAGTPTEGLGRVSTHSQEMDSGTEYGMGSSTKASFTPFVDPRVYQTSPTDEDEEDEESSAAALFTSELLRQEQAKLNEARKISVVNVNPTNIRPHSDTPEIRKYKKRFNSEILCAALWGVNLLVGTENGLMLLDRSGQGKVYNLINRRRFQQMDVLEGLNVLVTISGKKNKLRVYYLSWLRNRILHNDPEVEKKQGWITVGDLEGCIHYKVVKYERIKFLVIALKNAVEIYAWAPKPYHKFMAFKSFADLQHKPLLVDLTVEEGQRLKVIFGSHTGFHVIDVDSGNSYDIYIPSHIQGNITPHAIVILPKTDGMEMLVCYEDEGVYVNTYGRITKDVVLQWGEMPTSVAYIHSNQIMGWGEKAIEIRSVETGHLDGVFMHKRAQRLKFLCERNDKVFFASVRSGGSSQVFFMTLNRNSMMNW

SEQ ID NO: 5593 - protein, 439 aa, Homo sapiens
MKLANWYWLSSAVLATYGFLVVANNETEEIKDERAKDVCPVRLESRGKCEEAGECPYQVSLPPLTIQLPKQFSRIEEVFKEVQNLKEIVNSLKKSCQDCKLQADDNGDPGRNGLLLPSTGAPGEVGDNRVRELESEVNKLSSELKNAKEEINVLHGRLEKLNLVNMNNIENYVDSKVANLTFVVNSLDGKCSKCPSQEQIQSRPVQHLIYKDCSDYYAIGKRSSETYRVTPDPKNSSFEVYCDMETMGGGWTVLQARLDGSTNFTRTWQDYKAGFGNLRREFWLGNDKIHLLTKSKEMILRIDLEDFNGVELYALYDQFYVANEFLKYRLHVGNYNGTAGDALRFNKHYNHDLKFFTTPDKDNDRYPSGNCGLYYSSGWWFDACLSANLNGKYYHQKYRGVRNGIFWGTWPGVSEAHPGGYKSSFKEAKMMIRPKHFKP

SEQ ID NO: 5594 - protein, 208 aa, Homo sapiens
MAPLGEVGNYFGVQDAVPFGNVPVLPVDSPVLLSDHLGQSEAGGLPRGPAVTDLDHLKGILRRRQLYCRTGFHLEIFPNGTIQGTRKDHSRFGILEFISIAVGLVSIRGVDSGLYLGMNEKGELYGSEKLTQECVFREQFEENWYNTYSSNLYKHVDTGRRYYVALNKDGTPREGTRTKRHQKFTHFLPRPVDPDKVPELYKDILSQS

SEQ ID NO: 5595 - protein, 153 aa, Homo sapiens
MNVGVAHSEVNPNTRVMNSRGIWLAYIILVGLLHMVLLSIPFFSIPVVWTLTNVIHNLATYVFLHTVKGTPFETPDQGKARLLTHWEQMDYGLQFTSSRKFLSISPIVLYLLASFYTKYDAAHFLINTASLLSVLLPKLPQFHGVRVFGINKY

SEQ ID NO: 5596 - protein, 756 aa, Homo sapiens
MASAPPASPPGSEPPGPDPEPGGPDGPGAAQLAPGPAELRLGAPVGGPDPQSPGLDEPAPGAAADGGARWSAGPAPGLEGGPRDPGPSAPPPRSGPRGQLASPDAPGPGPRSEAPLPELDPLFSWTEEPEECGPASCPESAPFRLQGSSSSHRARGEVDVFSPFPAPTAGELALEQGPGSPPQPSDLSQTHPLPSEPVGSQEDGPRLRAVFDALDGDGDGFVRIEDFIQFATVYGAEQVKDLTKYLDPSGLGVISFEDFYQGITAIRNGDPDGQCYGGVASAQDEEPLACPDEFDDFVTYEANEVTDSAYMGSESTYSECETFTDEDTSTLVHPELQPEGDADSAGGSAVPSECLDAMEEPDHGALLLLPGRPHPHGQSVITVIGGEEHFEDYGEGSEAELSPETLCNGQLGCSDPAFLTPSPTKRLSSKKVARYLHQSGALTMEALEDPSPELMEGPEEDIADKVVFLERRVLELEKDTAATGEQHSRLRQENLQLVHRANALEEQLKEQELRACEMVLEETRRQKELLCKMEREKSIEIENLQTRLQQLDEENSELRSCTPCLKANIERLEEEKQKLLDEIESLTLRLSEEQENKRRMGDRLSHERHQFQRDKEATQELIEDLRKQLEHLQLLKLEAEQRRGRSSSMGLQEYHSRARESELEQEVRRLKQDNRNLKEQNEELNGQIITLSIQGAKSLFSTAFSESLAAEISSVSRDELMEAIQKQEEINFRLQDYIDRIIVAIMETNPSILEVK

SEQ ID NO: 5597 - protein, 910 aa, Homo sapiens
MDTAEEDICRVCRSEGTPEKPLYHPCVCTGSIKFIHQECLVQWLKHSRKEYCELCKHRFAFTPIYSPDMPSRLPIQDIFAGLVTSIGTAIRYWFHYTLVAFAWLGVVPLTACRIYKCLFTGSVSSLLTLPLDMLSTENLLADCLQGCFVVTCTLCAFISLVWLREQIVHGGAPIWLEHAAPPFNAAGHHQNEAPAGGNGAENVAADQPANPPAENAVVGENPDAQDDQAEEEEEDNEEEDDAGVEDAADANNGAQDDMNWNALEWDRAAEELTWERMLGLDGSLVFLEHVFWVVSLNTLFILVFAFCPYHIGHFSLVGLGFEEHVQASHFEGLITTIVGYILLAITLIICHGLATLVKFHRSRRLLGVCYIVVKVSLLVVVEIGVFPLICGWWLDICSLEMFDATLKDRELSFQSAPGTTMFLHWLVGMVYVFYFASFILLLREVLRPGVLWFLRNLNDPDFNPVQEMIHLPIYRHLRRFILSVIVFGSIVLLMLWLPIRIIKSVLPNFLPYNVMLYSDAPVSELSLELLLLQVVLPALLEQGHTRQWLKGLVRAWTVTAGYLLDLHSYLLGDQEENENSANQQVNNNQHARNNNAIPVVGEGLHAAHQAILQQGGPVGFQPYRRPLNFPLRIFLLIVFMCITLLIASLICLTLPVFAGRWLMSFWTGTAKIHELYTAACGLYVCWLTIRAVTVMVAWMPQGRRVIFQKVKEWSLMIMKTLIVAVLLAGVVPLLLGLLFELVIVAPLRVPLDQTPLFYPWQDWALGVLHAKIIAAITLMGPQWWLKTVIEQVYANGIRNIDLHYIVRKLAAPVISVLLLSLCVPYVIASGVVPLLGVTAEMQNLVHRRIYPFLLMVVVLMAILSFQVRQFKRLYEHIKNDKYLVGQRLVNYERKSGKQGSSPPPPQSSQE

SEQ ID NO: 5598 - protein, 930 aa, Homo sapiens
MEYERRGGRGDRTGRYGATDRSQDDGGENRSRDHDYRDMDYRSYPREYGSQEGKHDYDDSSEEQSAEDSYEASPGSETQRRRRRRHRHSPTGPPGFPRDGDYRDQDYRTEQGEEEEEEEDEEEEEKASNIVMLRMLPQAATEDDIRGQLQSHGVQAREVRLMRNKSSGQSRGFAFVEFSHLQDATRWMEANQHSLNILGQKVSMHYSDPKPKINEDWLCNKCGVQNFKRREKCFKCGVPKSEAEQKLPLGTRLDQQTLPLGGRELSQGLLPLPQPYQAQGVLASQALSQGSEPSSENANDTIILRNLNPHSTMDSILGALAPYAVLSSSNVRVIKDKQTQLNRGFAFIQLSTIVEAAQLLQILQALHPPLTIDGKTINVEFAKGSKRDMASNEGSRISAASVASTAIAAAQWAISQASQGGEGTWATSEEPPVDYSYYQQDEGYGNSQGTESSLYAHGYLKGTKGPGITGTKGDPTGAGPEASLEPGADSVSMQAFSRAQPGAAPGIYQQSAEASSSQGTAANSQSYTIMSPAVLKSELQSPTHPSSALPPATSPTAQESYSQYPVPDVSTYQYDETSGYYYDPQTGLYYDPNSQYYYNAQSQQYLYWDGERRTYVPALEQSADGHKETGAPSKEGKEKKEKHKTKTAQQIAKDMERWARSLNKQKENFKNSFQPISSLRDDERRESATADAGYAILEKKGALAERQHTSMDLPKLASDDRPSPPRGLVAAYSGESDSEEEQERGGPEREEKLTDWQKLACLLCRRQFPSKEALIRHQQLSGLHKQNLEIHRRAHLSENELEALEKNDMEQMKYRDRAAERREKYGIPEPPEPKRRKYGGISTASVDFEQPTRDGLGSDNIGSRMLQAMGWKEGSGLGRKKQGIVTPIEAQTRVRGSGLGARGSSYGVTSTESYKETLHKTMVTRFNEAQ

SEQ ID NO: 5599 - protein, 852 aa, Homo sapiens
MEYERRGGRGDRTGRYGATDRSQDDGGENRSRDHDYRDMDYRSYPREYGSQEGKHDYDDSSEEQSAEIRGQLQSHGVQAREVRLMRNKSSGQSRGFAFVEFSHLQDATRWMEANQHSLNILGQKVSMHYSDPKPKINEDWLCNKCGVQNFKRREKCFKCGVPKSEAEQKLPLGTRLDQQTLPLGGRELSQGLLPLPQPYQAQGVLASQALSQGSEPSSENANDTIILRNLNPHSTMDSILGALAPYAVLSSSNVRVIKDKQTQLNRGFAFIQLSTIEAAQLLQILQALHPPLTIDGKTINVEFAKGSKRDMASNEGSRISAASVASTAIAAAQWAISQASQGGEGTWATSEEPPVDYSYYQQDEGYGNSQGTESSLYAHGYLKGTKGPGITGTKGDPTGAGPEASLEPGADSVSMQAFSRAQPGAAPGIYQQSAEASSSQGTAANSQSYTIMSPAVLKSELQSPTHPSSALPPATSPTAQESYSQYPVPDVSTYQYDETSGYYYDPQTGLYYDPNSQYYYNAQSQQYLYWDGERRTYVPALEQSADGHKETGAPSKEGKEKKEKHKTKTAQQIAKDMERWARSLNKQKENFKNSFQPISSLRDDERRESATADAGYAILEKKGALAERQHTSMDLPKLASDDRPSPPRGLVAAYSGESDSEEEQERGGPEREEKLTDWQKLACLLCRRQFPSKEALIRHQQLSGLHKQNLEIHRRAHLSENELEALEKNDMEQMKYRDRAAERREKYGIPEPPEPKRRKYGGISTASVDFEQPTRDGLGSDNIGSRMLQAMGWKEGSGLGRKKQGIVTPIEAQTRVRGSGLGARGSSYGVTSTESYKETLHKTMVTRFNEAQ

SEQ ID NO: 5600 - protein, 489 aa, Homo sapiens
MKELDPKNDISEDKLSVVGEATGGPTRNGARGPGSEGVWEPGSWPERPRGDAGAEWEPLGIPQGNKLLGGSVPACHELKAFANQGCVLVPPRLDDPTEKGACPPVRRGKNFSSTSDLSKPPMPCEEKKTYDCSECGKAFSRSSSLIKHQRIHTGEKPFECDTCGKHFIERSSLTIHQRVHTGEKPYACGDCGKAFSQRMNLTVHQRTHTGEKPYVCDVCGKAFRKTSSLTQHERIHTGEKPYACGDCGKAFSQNMHLIVHQRTHTGEKPYVCPECGRAFSQNMHLTEHQRTHTGEKPYACKECGKAFNKSSSLTLHQRNHTGEKPYVCGECGKAFSQSSYLIQHQRFHIGVKPFECSECGKAFSKNSSLTQHQRIHTGEKPYECYICKKHFTGRSSLIVHQIVHTGEKPYVCGECGKAFSQSAYLIEHQRIHTGEKPYRCGQCGKSFIKNSSLTVHQRIHTGEKPYRCGECGKTFSRNTNLTRHLRIHT

SEQ ID NO: 5601 - protein, 695 aa, Homo sapiens
MADIKTGIFAKNVQKRLNRAQEKVLQKLGKADETKDEQFEEYVQNFKRQEAEGTRLQRELRGYLAAIKGMQEASMKLTESLHEVYEPDWYGREDVKMVGEKCDVLWEDFHQKLVDGSLLTLDTYLGQFPDIKNRIAKRSRKLVDYDSARHHLEALQSSKRKDESRISKAEEEFQKAQKVFEEFNVDLQEELPSLWSRRVGFYVNTFKNVSSLEAKFHKEIAVLCHKLYEVMTKLGDQHADKAFTIQGAPSDSGPLRIAKTPSPPEEPSPLPSPTASPNHTLAPASPAPARPRSPSQTRKGPPVPPLPKVTPTKELQQENIISFFEDNFVPEISVTTPSQNEVPEVKKEETLLDLDFDPFKPEVTPAGSAGVTHSPMSQTLPWDLWTTSTDLVQPASGGSFNGFTQPQDTSLFTMQTDQSMICNLAESEQAPPTEPKAEEPLAAVTPAVGLDLGMDTRAEEPVEEAVIIPGADADAAVGTLVSAAEGAPGEEAEAEKATVPAGEGVSLEEAKIGTETTEGAESAQPEAEELEATVPQEKVIPSVVIEPASNHEEEGENEITIGAEPKETTEDAAPPGPTSETPELATEQKPIQDPQPTPSAPAMGAADQLASAREASQELPPGFLYKVETLHDFEAANSDELTLQRGDVVLVVPSDSEADQDAGWLVGVKESDWLQYRDLATYKGLFPENFTRRLD

SEQ ID NO: 5602 - protein, 653 aa, Homo sapiens
MADIKTGIFAKNVQKRLNRAQEKVLQKLGKADETKDEQFEEYVQNFKRQEAEGTRLQRELRGYLAAIKGMQEASMKLTESLHEVYEPDWYGREDVKMVGEKCDVLWEDFHQKLVDGSLLTLDTYLGQFPDIKNRIAKRSRKLVDYDSARHHLEALQSSKRKDESRISKAEEEFQKAQKVFEEFNVDLQEELPSLWSRRVGFYVNTFKNVSSLEAKFHKEIAVLCHKLYEVMTKLGDQHADKAFTIQGAPSDSGPLRIAKTPSPPEEPSPLPSPTASPNHTLAPASPAPARPRSPSQTRKGPPVPPLPKVTPTKELQQENIISFFEDNFVPEISVTTPSQNEVPEVKKEETLLDLDFDPFKPEVTPAGSAGVTHSPMSQTLPWDLWTTSTDLVQPASGGSFNGFTQPQDTSLFTMQTDQSMICNLIIPGADADAAVGTLVSAAEGAPGEEAEAEKATVPAGEGVSLEEAKIGTETTEGAESAQPEAEELEATVPQEKVIPSVVIEPASNHEEEGENEITIGAEPKETTEDAAPPGPTSETPELATEQKPIQDPQPTPSAPAMGAADQLASAREASQELPPGFLYKVETLHDFEAANSDELTLQRGDVVLVVPSDSEADQDAGWLVGVKESDWLQYRDLATYKGLFPENFTRRLD

SEQ ID NO: 5603 - protein, 1001 aa, Homo sapiens
MIFPVARYALRWLRRPEDRAFSRAAMEMALRGVRKVLCVAEKNDAAKGIADLLSNGRMRRREGLSKFNKIYEFDYHLYGQNVTMVMTSVSGHLLAHDFQMQFRKWQSCNPLVLFEAEIEKYCPENFVDIKKTLERETRQCQALVIWTDCDREGENIGFEIIHVCKAVKPNLQVLRARFSEITPHAVRTACENLTEPDQRVSDAVDVRQELDLRIGAAFTRFQTLRLQRIFPEVLAEQLISYGSCQFPTLGFVVERFKAIQAFVPEIFHRIKVTHDHKDGIVEFNWKRHRLFNHTACLVLYQLCVEDPMATVVEVRSKPKSKWRPQALDTVELEKLASRKLRINAKETMRIAEKLYTQGYISYPRTETNIFPRDLNLTVLVEQQTPDPRWGAFAQSILERGGPTPRNGNKSDQAHPPIHPTKYTNNLQGDEQRLYEFIVRHFLACCSQDAQGQETTVEIDIAQERFVAHGLMILARNYLDVYPYDHWSDKILPVYEQGSHFQPSTVEMVDGETSPPKLLTEADLIALMEKHGIGTDATHAEHIETIKARMYVGLTPDKRFLPGHLGMGLVEGYDSMGYEMSKPDLRAELEADLKLICDGKKDKFVVLRQQVQKYKQVFIEAVAKAKKLDEALAQYFGNGTELAQQEDIYPAMPEPIRKCPQCNKDMVLKTKKNGGFYLSCMGFPECRSAVWLPDSVLEASRDSSVCPVCQPHPVYRLKLKFKRGSLPPTMPLEFVCCIGGCDDTLREILDLRFSGGPPRASQPSGRLQANQSLNRMDNSQHPQPADSRQTGSSKALAQTLPPPTAAGESNSVTCNCGQEAVLLTVRKEGPNRGRQFFKCNGGSCNFFLWADSPNPGAGGPPALAYRPLGASLGCPPGPGIHLGGFGNPGDGSGSGTSCLCSQPSVTRTVQKDGPNKGRQFHTCAKPREQQCGFFQWVDENTAPGTSGAPSWTGDRGRTLESEARSKRPRASSSDMGSTAKKPRKCSLCHQPGHTRPFCPQNR

SEQ ID NO: 5604 - protein, 789 aa, Homo sapiens
MTSFQEVPLQTSNFAHVIFQNVAKSYLPNAHLECHYTLTPYIHPHPKDWVGIFKVGWSTARDYYTFLWSPMPEHYVEGSTVNCVLAFQGYYLPNDDGEFYQFCYVTHKGEIRGASTPFQFRASSPVEELLTMEDEGNSDMLVVTTKAGLLELKIEKTMKEKEELLKLIAVLEKETAQLREQVGRMERELNHEKERCDQLQAEQKGLTEVTQSLKMENEEFKKRFSDATSKAHQLEEDIVSVTHKAIEKETELDSLKDKLKKAQHEREQLECQLKTEKDEKELYKVHLKNTEIENTKLMSEVQTLKNLDGNKESVITHFKEEIGRLQLCLAEKENLQRTFLLTTSSKEDTCFLKEQLRKAEEQVQATRQEVVFLAKELSDAVNVRDRTMADLHTARLENEKVKKQLADAVAELKLNAMKKDQDKTDTLEHELRREVEDLKLRLQMAADHYKEKFKECQRLQKQINKLSDQSANNNNVFTKKTGNQQKVNDASVNTDPATSASTVDVKPSPSAAEADFDIVTKGQVCEMTKEIADKTEKYNKCKQLLQDEKAKCNKYADELAKMELKWKEQVKIAENVKLELAEVQDNYKELKRSLENPAERKMEGQNSQSPQCFKTCSEQNGYVLTLSNAQPVLQYGNPYASQETRDGADGAFYPDEIQRPPVRVPSWGLEDNVVCSQPARNFSRPDGLEDSEDSKEDENVPTAPDPPSQHLRGHGTGFCFDSSFDVHKKCPLCELMFPPNYDQSKFEEHVESHWKVCPMCSEQFPPDYDQQVFERHVQTHFDQNVLNFD

SEQ ID NO: 5605 - protein, 417 aa, Homo sapiens
MPLYEGLGSGGEKTAVVIDLGEAFTKCGFAGETGPRCIIPSVIKRAGMPKPVRVVQYNINTEELYSYLKEFIHILYFRHLLVNPRDRRVVIIESVLCPSHFRETLTRVLFKYFEVPSVLLAPSHLMALLTLGINSAMVLDCGYRESLVLPIYEGIPVLNCWGALPLGGKALHKELETQLLEQCTVDTSVAKEQSLPSVMGSVPEGVLEDIKARTCFVSDLKRGLKIQAAKFNIDGNNERPSPPPNVDYPLDGEKILHILGSIRDSVVEILFEQDNEEQSVATLILDSLIQCPIDTRKQLAENLVVIGGTSMLPGFLHRLLAEIRYLVEKPKYKKALGTKTFRIHTPPAKANCVAWLGGAIFGALQDILGSRSVSKEYYNQTGRIPDWCSLNNPPLEMMFDVGKTQPPLMKRAFSTEK

SEQ ID NO: 5606 - protein, 763 aa, Homo sapiens
MDHLNEATQGKEHSEMSNNVSDPKGPPAKIARLEQNGSPLGRGRLGSTGAKMQGVPLKHSGHLMKTNLRKGTMLPVFCVVEHYENAIEYDCKEEHAEFVLVRKDMLFNQLIEMALLSLGYSHSSAAQAKGLIQVGKWNPVPLSYVTDAPDATVADMLQDVYHVVTLKIQLHSCPKLEDLPPEQWSHTTVRNALKDLLKDMNQSSLAKECPLSQSMISSIVNSTYYANVSAAKCQEFGRWYKHFKKTKDMMVEMDSLSELSQQGANHVNFGQQPVPGNTAEQPPSPAQLSHGSQPSVRTPLPNLHPGLVSTPISPQLVNQQLVMAQLLNQQYAVNRLLAQQSLNQQYLNHPPPVSRSMNKPLEQQVSTNTEVSSEIYQWVRDELKRAGISQAVFARVAFNRTQGLLSEILRKEEDPKTASQSLLVNLRAMQNFLQLPEAERDRIYQDERERSLNAASAMGPAPLISTPPSRPPQVKTATIATERNGKPENNTMNINASIYDEIQQEMKRAKVSQALFAKVAATKSQGWLCELLRWKEDPSPENRTLWENLSMIRRFLSLPQPERDAIYEQESNAVHHHGDRPPHIIHVPAEQIQQQQQQQQQQQQQQQAPPPPQPQQQPQTGPRLPPRQPTVASPAESDEENRQKTRPRTKISVEALGILQSFIQDVGLYPDEEAIQTLSAQLDLPKYTIIKFFQNQRYYLKHHGKLKDNSGLEVDVAEYKEEELLKDLEESVQDKNTNTLFSVKLEEELSVEGNTDINTDLKD

SEQ ID NO: 5607 - protein, 433 aa, Homo sapiens
MIGGLFIYNHKGEVLISRVYRDDIGRNAVDAFRVNVIHARQQVRSPVTNIARTSFFHVKRSNIWLAAVTKQNVNAAMVFEFLYKMCDVMAAYFGKISEENIKNNFVLIYELLDEILDFGYPQNSETGALKTFITQQGIKSQTKEEQSQITSQVTGQIGWRREGIKYRRNELFLDVLESVNLLMSPQGQVLSAHVSGRVVMKSYLSGMPECKFGMNDKIVIEKQGKGTADETSKSGKQSIAIDDCTFHQCVRLSKFDSERSISFIPPDGEFELMRYRTTKDIILPFRVIPLVREVGRTKLEVKVVIKSNFKPSLLAQKIEVRIPTPLNTSGVQVICMKGKAKYKASENAIVWKIKRMAGMKESQISAEIELLPTNDKKKWARPPISMNFEVPFAPSGLKVRYLKVFEPKLNYSDHDVIKWVRYIGRSGIYETRC

SEQ ID NO: 5608 - protein, 435 aa, Homo sapiens
MIGGLFIYNHKGEVLISRVYRDDIGRNAVDAFRVNVIHARQQVRSPVTNIARTSFFHVKRSNIWLAAVTKQNVNAAMVFEFLYKMCDVMAAYFGKISEENIKNNFVLIYELLDEILDFGYPQNSETGALKTFITQQGIKSQHQTKEEQSQITSQVTGQIGWRREGIKYRRNELFLDVLESVNLLMSPQGQVLSAHVSGRVVMKSYLSGMPECKFGMNDKIVIEKQGKGTADETSKSGKQSIAIDDCTFHQCVRLSKFDSERSISFIPPDGEFELMRYRTTKDIILPFRVIPLVREVGRTKLEVKVVIKSNFKPSLLAQKIEVRIPTPLNTSGVQVICMKGKAKYKASENAIVWKIKRMAGMKESQISAEIELLPTNDKKKWARPPISMNFEVPFAPSGLKVRYLKVFEPKLNYSDHDVIKWVRYIGRSGIYETRC

SEQ ID NO: 5609 - protein, 713 aa, Homo sapiens
MLLATLLLLLLGGALAHPDRIIFPNHACEDPPAVLLEVQGTLQRPLVRDSRTSPANCTWLILGSKEQTVTIRFQKLHLACGSERLTLRSPLQPLISLCEAPPSPLQLPGGNVTITYSYAGARAPMGQGFLLSYSQDWLMCLQEEFQCLNHRCVSAVQRCDGVDACGDGSDEAGCSSDPFPGLTPRPVPSLPCNVTLEDFYGVFSSPGYTHLASVSHPQSCHWLLDPHDGRRLAVRFTALDLGFGDAVHVYDGPGPPESSRLLRSLTHFSNGKAVTVETLSGQAVVSYHTVAWSNGRGFNATYHVRGYCLPWDRPCGLGSGLGAGEGLGERCYSEAQRCDGSWDCADGTDEEDCPGCPPGHFPCGAAGTSGATACYLPADRCNYQTFCADGADERRCRHCQPGNFRCRDEKCVYETWVCDGQPDCADGSDEWDCSYVLPRKVITAAVIGSLVCGLLLVIALGCTCKLYAIRTQEYSIFAPLSRMEAEIVQQQAPPSYGQLIAQGAIPPVEDFPTENPNDNSVLGNLRSLLQILRQDMTPGGGPGARRRQRGRLMRRLVRRLRRWGLLPRTNTPARASEARSQVTPSAAPLEALDGGTGPAREGGAVGGQDGEQAPPLPIKAPLPSASTSPAPTTVPEAPGPLPSLPLEPSLLSGVVQALRGRLLPSLGPPGPTRSPPGPHTAVLALEDEDDVLLVPLAEPGVWVAEAEDEPLLT

SEQ ID NO: 5610 - protein, 448 aa, Homo sapiens
MKSLSLLLAVALGLATAVSAGPAVIECWFVEDASGKGLAKRPGALLLRQGPGEPPPRPDLDPELYLSVHDPAGALQAAFRRYPRGAPAPHCEMSRFVPLPASAKWASGLTPAQNCPRALDGAWLMVSISSPVLSLSSLLRPQPEPQQEPVLITMATVVLTVLTHTPAPRVRLGQDALLDLSFAYMPPTSEAASSLAPGPPPFGLEWRRQHLGKGHLLLAATPGLNGQMPAAQEGAVAFAAWDDDEPWGPWTGNGTFWLPTVQPFQEGTYLATIHLPYLQGQVTLELAVYKPPKVSLMPATLARAAPGEAPPELLCLVSHFYPSGGLEVEWELRGGPGGRSQKAEGQRWLSALRHHSDGSVSLSGHLQPPPVTTEQHGARYACRIHHPSLPASGRSAEVTLEVAGLSGPSLEDSVGLFLSAFLLLGLFKALGWAAVYLSTCKDSKKKAE

SEQ ID NO: 5611 - protein, 299 aa, Homo sapiens
MKSLSLLLAVALGLATAVSAGPAVIECWFVEDASGKGLAKRPGALLLRQGPGEPPPRPDLDPELYLSVHDPAGALQAAFRRYPRGAPAPHCEMSRFVPLPASAKWASGLTPAQNCPRALDGAWLMVSISSPVLSLSSLLRPQPEPQQEPVLITMATVVLTVLTHTPAPRVRLGQDALLDLSFAYMPPTSEAASSLAPGPPPFGLEWRRQHLGKGHLLLAATPGLNGQMPAAQEGAVAFAAWDDDEPWGPWTGNGTFWLPTVQPFQEGTYLATIHLPYLQGQVTLELAVYSELGDRGLQG

SEQ ID NO: 5612 - protein, 412 aa, Homo sapiens
MKSLSLLLAVALGLATAVSAGPAVIECWFVEDASGKGLAKRPGALLLRQGPGEPPPRPDLDPELYLSVHDPAGALQAAFRRYPRGAPAPHCEMSRFVPLPASAKWASGLTPAQNCPRALDGAWLMVSISSPVLSLSSLLRPQPEPQQEPVLITMATVVLTVLTHTPAPRVRLGQDALLDLSFAYMPPTSEAASSLAPGPPPFGLEWRRQHLGKGHLLLAATPGLNGQMPAAQEGAVAFAAWDDDEPWGPWTGNGTFWLPTVQPFQEGTYLATIHLPYLQGQVTLELAVYKPPKVSLMPATLARAAPGEAPPELLCLVSHFYPSGGLEVEWELRGGPGGRSQKAEGQRWLSALRHHSDGSVSLSGHLQPPPVTTEQHGARYACRIHHPSLPASGRSAEVTLEVAGKSWELCGI

SEQ ID NO: 5613 - protein, 478 aa, Homo sapiens [sequence omitted]

SEQ ID NO: 5614 - protein, 157 aa, Homo sapiens
MSSQKGNVARSRPQKHQNTFSFKNDKFDKSVQTKKINAKLHDGVCQRCKEVLEWRVKYSKYKPLSKPKKCVKCLQKTVKDSYHIMCRPCACELEVCAKCGKKEDIVIPLNKETEKIEHTENNLSSNHRRSCRRNEESDDDLDFDIDLEDTGGDHQMN

SEQ ID NO: 5615 - protein, 35 aa, Homo sapiens
MSSQKGNVARSRPQKHQNTFSFKNDKFDKSVQTKC

SEQ ID NO: 5616 - protein, 531 aa, Homo sapiens
MADVLSVLRQYNIQKKEIVVKGDEVIFGEFSWPKNVKTNYVVWGTGKEGQPREYYTLDSILFLLNNVHLSHPVYVRRAATENIPVVRRPDRKDLLGYLNGEASTSASIDRSAPLEIGLQRSTQVKRAADEVLAEAKKPRIEDEECVRLDKERLAARLEGHKEGIVQTEQIRSLSEAMSVEKIAAIKAKIMAKKRSTIKTDLDDDITALKQRSFVDAEVDVTRDIVSRERVWRTRTTILQSTGKNFSKNIFAILQSVKAREEGRAPEQRPAPNAAPVDPTLRTKQPIPAAYNRYDQERFKGKEETEGFKIDTMGTYHGMTLKSVTEGASARKTQTPAAQPVPRPVSQARPPPNQKKGSRTPIIIIPAATTSLITMLNAKDLLQDLKFVPSDEKKKQGCQRENETLIQRRKDQMQPGGTAISVTVPYRVVDQPLKLMPQDWDRVVAVFVQGPAWQFKGWPWLLPDGSPVDIFAKIKAFHLKYDEVRLDPNVQKWDVTVLELSYHKRHLDRPVFLRFWETLDRYMVKHKSHLRF

SEQ ID NO: 5617 - protein, 216 aa, Homo sapiens
MSFLFGSRSSKTFKPKKNIPEGSHQYELLKHAEATLGSGNLRMAVMLPEGEDLNEWVAVNTVDFFNQINMLYGTITDFCTEESCPVMSAGPKYEYHWADGTNIKKPIKCSAPKYIDYLMTWVQDQLDDETLFPSKIGVPFPKNFMSVAKTILKRLFRVYAHIYHQHFDPVIQLQEEAHLNTSFKHFIFFVQEFNLIDRRELAPLQELIEKLTSKDR

SEQ ID NO: 5618 - protein, 782 aa, Homo sapiens
MAAAMETEQLGVEIFETADCEENIESQDRPKLEPFYVERYSWSQLKKLLADTRKYHGYMMAKAPHDFMFVKRNDPDGPHSDRIYYLAMSGENRENTLFYSEIPKTINRAAVLMLSWKPLLDLFQATLDYGMYSREEELLRERKRIGTVGIASYDYHQGSGTFLFQAGSGIYHVKDGGPQGFTQQPLRPNLVETSCPNIRMDPKLCPADPDWIAFIHSNDIWISNIVTREERRLTYVHNELANMEEDARSAGVATFVLQEEFDRYSGYWWCPKAETTPSGGKILRILYEENDESEVEIIHVTSPMLETRRADSFRYPKTGTANPKVTFKMSEIMIDAEGRIIDVIDKELIQPFEILFEGVEYIARAGWTPEGKYAWSILLDRSQTRLQIVLISPELFIPVEDDVMERQRLIESVPDSVTPLIIYEETTDIWINIHDIFHVFPQSHEEEIEFIFASECKTGFRHLYKITSILKESKYKRSSGGLPAPSDFKCPIKEEIAITSGEWEVLGRHGSNIQVDEVRRLVYFEGTKDSPLEHHLYVVSYVNPGEVTRLTDRGYSHSCCISQHCDFFISKYSNQKNPHCVSLYKLSSPEDDPTCKTKEFWATILDSAGPLPDYTPPEIFSFESTTGFTLYGMLYKPHDLQPGKKYPTVLFIYGGPQVAIAGAPVTLWIFYDTGYTERYMGHPDQNEQGYYLGSVAMQAEKFPSEPNRLLLLHGFLDENVHFAHTSILLSFLVRAGKPYDLQIYPQERHSIRVPESGEHYELHLLHYLQENLGSRIAALKVI

SEQ ID NO: 5619 - protein, 882 aa, Homo sapiens
MAAAMETEQLGVEIFETADCEENIESQDRPKLEPFYVERYSWSQLKKLLADTRKYHGYMMAKAPHDFMFVKRNDPDGPHSDRIYYLAMSGENRENTLFYSEIPKTINRAAVLMLSWKPLLDLFQATLDYGMYSREEELLRERKRIGTVGIASYDYHQGSGTFLFQAGSGIYHVKDGGPQGFTQQPLRPNLVETSCPNIRMDPKLCPADPDWIAFIHSNDIWISNIVTREERRLTYVHNELANMEEDARSAGVATFVLQEEFDRYSGYWWCPKAETTPSGGKILRILYEENDESEVEIIHVTSPMLETRRADSFRYPKTGTANPKVTFKMSEIMIDAEGRIIDVIDKELIQPFEILFEGVEYIARAGWTPEGKYAWSILLDRSQTRLQIVLISPELFIPVEDDVMERQRLIESVPDSVTPLIIYEETTDIWINIHDIFHVFPQSHEEEIEFIFASECKTGFRHLYKITSILKESKYKRSSGGLPAPSDFKCPIKEEIAITSGEWEVLGRHGSNIQVDEVRRLVYFEGTKDSPLEHHLYVVSYVNPGEVTRLTDRGYSHSCCISQHCDFFISKYSNQKNPHCVSLYKLSSPEDDPTCKTKEFWATILDSAGPLPDYTPPEIFSFESTTGFTLYGMLYKPHDLQPGKKYPTVLFIYGGPQVQLVNNRFKGVKYFRLNTLASLGYVVVVIDNRGSCHRGLKFEGAFKYKMGQIEIDDQVEGLQYLASRYDFIDLDRVGIHGWSYGGYLSLMALMQRSDIFRVAIAGAPVTLWIFYDTGYTERYMGHPDQNEQGYYLGSVAMQAEKFPSEPNRLLLLHGFLDENVHFAHTSILLSFLVRAGKPYDLQIYPQERHSIRVPESGEHYELHLLHYLQENLGSRIAALKVI

SEQ ID NO: 5620 - protein, 898 aa, Homo sapiens
MWKRSEQMKIKSGKCNMAAAMETEQLGVEIFETADCEENIESQDRPKLEPFYVERYSWSQLKKLLADTRKYHGYMMAKAPHDFMFVKRNDPDGPHSDRIYYLAMSGENRENTLFYSEIPKTINRAAVLMLSWKPLLDLFQATLDYGMYSREEELLRERKRIGTVGIASYDYHQGSGTFLFQAGSGIYHVKDGGPQGFTQQPLRPNLVETSCPNIRMDPKLCPADPDWIAFIHSNDIWISNIVTREERRLTYVHNELANMEEDARSAGVATFVLQEEFDRYSGYWWCPKAETTPSGGKILRILYEENDESEVEIIHVTSPMLETRRADSFRYPKTGTANPKVTFKMSEIMIDAEGRIIDVIDKELIQPFEILFEGVEYIARAGWTPEGKYAWSILLDRSQTRLQIVLISPELFIPVEDDVMERQRLIESVPDSVTPLIIYEETTDIWINIHDIFHVFPQSHEEEIEFIFASECKTGFRHLYKITSILKESKYKRSSGGLPAPSDFKCPIKEEIAITSGEWEVLGRHGSNIQVDEVRRLVYFEGTKDSPLEHHLYVVSYVNPGEVTRLTDRGYSHSCCISQHCDFFISKYSNQKNPHCVSLYKLSSPEDDPTCKTKEFWATILDSAGPLPDYTPPEIFSFESTTGFTLYGMLYKPHDLQPGKKYPTVLFIYGGPQVQLVNNRFKGVKYFRLNTLASLGYVVVVIDNRGSCHRGLKFEGAFKYKMGQIEIDDQVEGLQYLASRYDFIDLDRVGIHGWSYGGYLSLMALMQRSDIFRVAIAGAPVTLWIFYDTGYTERYMGHPDQNEQGYYLGSVAMQAEKFPSEPNRLLLLHGFLDENVHFAHTSILLSFLVRAGKPYDLQIYPQERHSIRVPESGEHYELHLLHYLQENLGSRIAALKVI

SEQ ID NO: 5621 - protein, 847 aa, Homo sapiens
MWKRSEQMKIKSGKCNMAAAMETEQLGVEIFETADCEENIESQDRPKLEPFYVERYSWSQLKKLLADTRKYHGYMMAKAPHDFMFVKRNDPDGPHSDRIYYLAMSGENRENTLFYSEIPKTINRAAVLMLSWKPLLDLFQATLDYGMYSREEELLRERKRIGTVGIASYDYHQGSGTFLFQAGSGIYHVKDGGPQGFTQQPLRPNLVETSCPNIRMDPKLCPADPDWIAFIHSNDIWISNIVTREERRLTYVHNELANMEEDARSAGVATFVLQEEFDRYSGYWWCPKAETTPSGGKILRILYEENDESEVEIIHVTSPMLETRRADSFRYPKTGTANPKVTFKMSEIMIDAEGRIIDVIDKELIQPFEILFEGVEYIARAGWTPEGKYAWSILLDRSQTRLQIVLISPELFIPVEDDVMERQRLIESVPDSVTPLIIYEETTDIWINIHDIFHVFPQSHEEEIEFIFASECKTGFRHLYKITSILKESKYKRSSGGLPAPSDFKCPIKEEIAITSGEWEVLGRHGSNIQVDEVRRLVYFEGTKDSPLEHHLYVVSYVNPGEVTRLTDRGYSHSCCISQHCDFFISKYSNQKNPHCVSLYKLSSPEDDPTCKTKEFWATILDSAGPLPDYTPPEIFSFESTTGFTLYGMLYKPHDLQPGKKYPTVLFIYGGPQVQLVNNRFKGVKYFRLNTLASLGYVVVVIDNRGSCHRGLKFEGAFKYKMVAIAGAPVTLWIFYDTGYTERYMGHPDQNEQGYYLGSVAMQAEKFPSEPNRLLLLHGFLDENVHFAHTSILLSFLVRAGKPYDLQIYPQERHSIRVPESGEHYELHLLHYLQENLGSRIAALKVI

SEQ ID NO: 5622 - protein, 488 aa, Homo sapiens
MASHSAIPNGRGGAPSLQTSSRAHLGSSRVMDLATEQKLGPNGAGPAERARHQPPQPKAPGFLQPPPLRQPRTTPPPGAQCEVPASPQRPSPPGALPEQTRSLRAPPSSQDKIPQQNSESAMAKPQVVVAPVLRSKLSVNAPEFYPSGYSSSYTESYEVGCEDYPTPSEYVQDFLNHLTEQPGSFETEIEQFAETLNGCVTTDDALQELAELIYQQATSIPNFSYMGARLCNYLSHHLTISPQSGNFRQLLLQRCRTEYEVKDQAAKGDEVTRKRFHAFVFFLGELYLNLEIKGTNGQVTRADILQVGLRELLNALFSNPMDDNLICAVKLLKLTGSVLEDAWKEKGKMDMEEIIQRIENVVLDANCSRDVKQMLLKLVELRSSNWGRVHATSTYREATPENDPNYFMNEPTFYTSDGVPFTAADPDYQEKYQELLEREDFFPDYEENGTDLSGAGDPYLDDIDDEMDPEIEEAYEKFCLESERKRKQ

SEQ ID NO: 5623 - protein, 380 aa, Homo sapiens
MDSGCWLFGGEFEDSVFEERPERRSGPPASYCAKLCEPQWFYEETESSDDVEVLTLKKFKGDLAYRRQEYQKALQEYSSISEKLSSTNFAMKRDVQEGQARCLAHLGRHMEALEIAANLENKATNTDHLTTVLYLQLAICSSLQNLEKTIFCLQKLISLHPFNPWNWGKLAEAYLNLGPALSAALASSQKQHSFTSSDKTIKSFFPHSGKDCLLCFPETLPESSLFSVEANSSNSQKNEKALTNIQNCMAEKRETVLIETQLKACASFIRTRLLLQFTQPQQTSFALERNLRTQQEIEDKMKGFSFKEDTLLLIAEVMGEDIPEKIKDEVHPEVKCVGSVALTALVTVSSEEFEDKWFRKIKDHFCPFENQFHTEIQILA

SEQ ID NO: 5624 - protein, 572 aa, Homo sapiens
MPGEEEERAFLVAREELASALRRDSGQAFSLEQLRPLLASSLPLAARYLQLDAARLVRCNAHGEPRNYLNTLSTALNILEKYGRNLLSPQRPRYWRGVKFNNPVFRSTVDAVQGGRDVLRLYGYTEEQPDGLSFPEGQEEPDEHQVATVTLEVLLLRTELSLLLQNTHPRQQALEQLLEDKVEDDMLQLSEFDPLLREIAPGPLTTPSVPGSTPGPCFLCGSAPGTLHCPSCKQALCPACDHLFHGHPSRAHHLRQTLPGVLQGTHLSPSLPASAQPRPQSTSLLALGDSSLSSPNPASAHLPWHCAACAMLNEPWAVLCVACDRPRGCKGLGLGTEGPQGTGGLEPDLARGRWACQSCTFENEAAAVLCSICERPRLAQPPSLVVDSRDAGICLQPLQQGDALLASAQSQVWYCIHCTFCNSSPGWVCVMCNRTSSPIPAQHAPRPYASSLEKGPPKPGPPRRLSAPLPSSCGDPEKQRQDKMREEGLQLVSMIRKGKPQVPVQRRSSRLCSTRALRCLCSGCAQNCPTSWRWWLSWLDSRTLGWVPFPVRRPGEPGWIVMATLMKLWRSV

SEQ ID NO: 5625 - protein, 1160 aa, Homo sapiens
MDSKDESSHVWPTSAEHEQNAAQVHFVPDTGTVAQIVYTDDQVRPPQQVVYTADGASYTSVDGPEHTLVYIHPVEAAQTLFTDPGQVAYVQQDATAQQASLPVHNQVLPSIESVDGSDPLATLQTPLGRLEAKEEEDEDEDEDTEEDEEEDGEDTDLDDWEPDPPRPFDPHDLWCEECNNAHASVCPKHGPLHPIPNRPVLTRARASLPLVLYIDRFLGGVFSKRRIPKRTQFGPVEGPLVRGSELKDCYIHLKVSLDKGDRKERDLHEDLWFELSDETLCNWMMFVRPAQNHLEQNLVAYQYGHHVYYTTIKNVEPKQELKVWYAASYAEFVNQKIHDISEEERKVLREQEKNWPCYECNRRFISSEQLQQHLNSHDEKLDVFSRTRGRGRGRGKRRFGPGRRPGRPPKFIRLEITSENGEKSDDGTQDLLHFPTKEQFDEAEPATLNGLDQPEQTTIPIPQLPQETQSSLEHEPETHTLHLQPQHEESVVPTQSTLTADDMRRAKRIRLELQNAALQHLFIRKSFRPFKCLQCGKAFREKDKLDQHLRFHGREGNCPLTCDLCNKGFISSTSLESHMKLHSDQKTYSCIFCPESFDRLDLLKDHVAIHINDGYFTCPTCKKRFPDFIQVKKHVRSFHSEKIYQCTECDKAFCRPDKLRLHMLRHSDRKDFLCSTCGKQFKRKDKLREHMQRMHNPEREAKKADRISRSKTFKPRITSTDYDSFTFKCRLCMMGFRRRGMLVNHLSKRHPDMKIEEVPELTLPIIKPNRDYFCQYCDKVYKSASKRKAHILKNHPGAELPPSIRKLRPAGPGEPDPMLSTHTQLTGTIATPPVCCPHCSKQYSSKTKMVQHIRKKHPEFAQLSNTIHTPLTTAVISATPAVLTTDSATGETVVTTDLLTQAMTELSQTLTTDYRTPQGDYQRIQYIPVSQSASGLQQPQHIQLQVVQVASATSPHQSQQSTVDVGQLHDPQPYPQHAIQVQHIQVSEPTASAPSSAQVSGQPLSPSAQQAQQGLSPSHIQGSSSTQGQALQQQQQQQQNSSVQHTYLPSAWNSFRGYSSEIQMMTLPPGQFVITDSGVATPVTTGQVKAVTSGHYVLSESQSELEEKQTSALSGGVQVEPPAHSDSLDPQTNSQQQTTQYIITTTTNGNGSSEVHITKP

SEQ ID NO: 5626 - protein, 1156 aa, Homo sapiens
MDSKDESSHVWPTSAEHEQNAAQVHFVPDTGTVAQIVYTDDQVRPPQQVVYTADGASYTSVDGPEHTLVYIHPVEAAQTLFTDPGQVAYVQQDATAQQASLPVHNQVLPSIESVDGSDPLATLQTPLGRLEAKEEEDEDEDEDTEEDEEEDGEDTDLDDWEPDPPRPFDPHDLWCEECNNAHASVCPKHGPLHPIPNRPVLTRARASLPLVLYIDRFLGGVFSKRRIPKRTQFGPVEGPLVRGSELKDCYIHLKVSLDKGDRKERDLHEDLWFELSDETLCNWMMFVRPAQNHLEQNLVAYQYGHHVYYTTIKNVEPKQELKVWYAASYAEFVNQKIHDISEEERKVLREQEKNWPCYECNRRFISSEQLQQHLNSHDEKLDVFSRTRGRGRGRGKRRFGPGRRPGRPPKFIRLEITSENGEKSDDGTQDLLHFPTKEQFDEAEPATLNGLDQPEQTTIPIPQLPQETQSSLEHEPETHTLHLQPQHEESVVPTQSTLTADDMRRAKRIRNAALQHLFIRKSFRPFKCLQCGKAFREKDKLDQHLRFHGREGNCPLTCDLCNKGFISSTSLESHMKLHSDQKTYSCIFCPESFDRLDLLKDHVAIHINDGYFTCPTCKKRFPDFIQVKKHVRSFHSEKIYQCTECDKAFCRPDKLRLHMLRHSDRKDFLCSTCGKQFKRKDKLREHMQRMHNPEREAKKADRISRSKTFKPRITSTDYDSFTFKCRLCMMGFRRRGMLVNHLSKRHPDMKIEEVPELTLPIIKPNRDYFCQYCDKVYKSASKRKAHILKNHPGAELPPSIRKLRPAGPGEPDPMLSTHTQLTGTIATPPVCCPHCSKQYSSKTKMVQHIRKKHPEFAQLSNTIHTPLTTAVISATPAVLTTDSATGETVVTTDLLTQAMTELSQTLTTDYRTPQGDYQRIQYIPVSQSASGLQQPQHIQLQVVQVASATSPHQSQQSTVDVGQLHDPQPYPQHAIQVQHIQVSEPTASAPSSAQVSGQPLSPSAQQAQQGLSPSHIQGSSSTQGQALQQQQQQQQNSSVQHTYLPSAWNSFRGYSSEIQMMTLPPGQFVITDSGVATPVTTGQVKAVTSGHYVLSESQSELEEKQTSALSGGVQVEPPAHSDSLDPQTNSQQQTTQYIITTTTNGNGSSEVHITKP

SEQ ID NO: 5627 - protein, 1061 aa, Homo sapiens
MSAYSVPSTFAQASLPVHNQVLPSIESVDGSDPLATLQTPLGRLEAKEEEDEDEDEDTEEDEEEDGEDTDLDDWEPDPPRPFDPHDLWCEECNNAHASVCPKHGPLHPIPNRPVLTRARASLPLVLYIDRFLGGVFSKRRIPKRTQFGPVEGPLVRGSELKDCYIHLKVSLDKGDRKERDLHEDLWFELSDETLCNWMMFVRPAQNHLEQNLVAYQYGHHVYYTTIKNVEPKQELKVWYAASYAEFVNQKIHDISEEERKVLREQEKNWPCYECNRRFISSEQLQQHLNSHDEKLDVFSRTRGRGRGRGKRRFGPGRRPGRPPKFIRLEITSENGEKSDDGTQDLLHFPTKEQFDEAEPATLNGLDQPEQTTIPIPQLPQETQSSLEHEPETHTLHLQPQHEESVVPTQSTLTADDMRRAKRIRLELQNAALQHLFIRKSFRPFKCLQCGKAFREKDKLDQHLRFHGREGNCPLTCDLCNKGFISSTSLESHMKLHSDQKTYSCIFCPESFDRLDLLKDHVAIHINDGYFTCPTCKKRFPDFIQVKKHVRSFHSEKIYQCTECDKAFCRPDKLRLHMLRHSDRKDFLCSTCGKQFKRKDKLREHMQRMHNPEREAKKADRISRSKTFKPRITSTDYDSFTFKCRLCMMGFRRRGMLVNHLSKRHPDMKIEEVPELTLPIIKPNRDYFCQYCDKVYKSASKRKAHILKNHPGAELPPSIRKLRPAGPGEPDPMLSTHTQLTGTIATPPVCCPHCSKQYSSKTKMVQHIRKKHPEFAQLSNTIHTPLTTAVISATPAVLTTDSATGETVVTTDLLTQAMTELSQTLTTDYRTPQGDYQRIQYIPVSQSASGLQQPQHIQLQVVQVASATSPHQSQQSTVDVGQLHDPQPYPQHAIQVQHIQVSGQPLSPSAQQAQQGLSPSHIQGSSSTQGQALQQQQQQQQNSSVQHTYLPSAWNSFRGYSSEIQMMTLPPGQFVITDSGVATPVTTGQVKAVTSGHYVLSESQSELEEKQTSALSGGVQVEPPAHSDSLDPQTNSQQQTTQYIITTTTNGNGSSEVHITKP

SEQ ID NO: 5628 - protein, 1023 aa, Homo sapiens
MSAYSVPSTFAQASLPVHNQVLPSIESVDGSDPLATLQTPLGRLEAKEEEDEDEDEDTEEDEEEDGEDTDLDDWEPDPPRPFDPHDLWCEECNNAHASVCPKHGPLHPIPNRPVLTRARASLPLVLYIDRFLGGVFSKRRIPKRTQFGPVEGPLVRGSELKDCYIHLKVSLDKGDRKERDLHEDLWFELSDETLCNWMMFVRPAQNHLEQNLVAYQYGHHVYYTTIKNVEPKQELKVWYAASYAEFVNQKIHDISEEERKVLREQEKNWPCYECNRRFISSEQLQQHLNSHDEKLDVFSRTRGRGRGRGKRRFGPGRRPGRPPKFIRLEITSENGEKSDDGTQDLLHFPTKEQFDEAEPATLNGLDQPEQTTIPIPQLPQETQSSLEHEPETHTLHLQPQHEESVVPTQSTLTADDMRRAKRIRNAALQHLFIRKSFRPFKCLQCGKAFREKDKLDQHLRFHGREGNCPLTCDLCNKGFISSTSLESHMKLHSDQKTYSCIFCPESFDRLDLLKDHVAIHINDGYFTCPTCKKRFPDFIQVKKHVRSFHSEKIYQCTECDKAFCRPDKLRLHMLRHSDRKDFLCSTCGKQFKRKDKLREHMQRMHNPEREAKKADRISRSKTFKPRITSTDYDSFTFKCRLCMMGFRRRGMLVNHLSKRHPDMKIEEVPELTLPIIKPNRDYFCQYCDKVYKSASKRKAHILKNHPGAELPPSIRKLRPAGPGEPDPMLSTHTQLTGTIATPPVCCPHCSKQYSSKTKMVQHIRKKHPEFAQLSNTIHTPLTTAVISATPAVLTTDSATGETVVTTDLLTQAMTELSQTLTTDYRTPQGDYQRIQYIPVSQSASGLQQPQHIQLQVVQVASVSGQPLSPSAQQAQQGLSPSHIQGSSSTQGQALQQQQQQQQNSSVQHTYLPSAWNSFRGYSSEIQMMTLPPGQFVITDSGVATPVTTGQVKAVTSGHYVLSESQSELEEKQTSALSGGVQVEPPAHSDSLDPQTNSQQQTTQYIITTTTNGNGSSEVHITKP

SEQ ID NO: 5629 - protein, 2677 aa, Homo sapiens
MSTCCWCTPGGASTIDFLKRYASNTPSGEFQTADEDLCYCLECVAEYHKARDELPFLHEVLWELETLRLINHFEKSMKAEIGDDDELYIVDNNGEMPLFDITGQDFENKLRVPLLEILKYPYLLLHERVNELCVEALCRMEQANCSFQVFDKHPGIYLFLVHPNEMVRRWAILTARNLGKVDRDDYYDLQEVLLCLFKVIELGLLESPDIYTSSVLEKGKLILLPSHMYDTTNYKSYWLGICMLLTILEEQAMDSLLLGSDKQNDFMQSILHTMEREADDDSVDPFWPALHCFMVILDRLGSKVWGQLMDPIVAFQTIINNASYNREIRHIRNSSVRTKLEPESYLDDMVTCSQIVYNYNPEKTKKDSGWRTAICPDYCPNMYEEMETLASVLQSDIGQDMRVHNSTFLWFIPFVQSLMDLKDLGVAYIAQVVNHLYSEVKEVLNQTDAVCDKVTEFFLLILVSVIELHRNKKCLHLLWVSSQQWVEAVVKCAKLPTTAFTRSSEKSSGNCSKGTAMISSLSLHSMPSNSVQLAYVQLIRSLLKEGYQLGQQSLCKRFWDKLNLFLRGNLSLGWQLTSQETHELQSCLKQIIRNIKFKAPPCNTFVDLTSACKISPASYNKEESEQMGKTSRKDMHCLEASSPTFSKEPMKVQDSVSIKADNTIEGDNNEQNYIKDVKLEDHLLAGSCLKQSSKNIFTERAEDQIKISTRKQKSVKEISSYTPKDCTSRNGPERGCDRGIIVSTRLLTDSSTDALEKVSTSNEDFSLKDDALAKTSKRKTKVQKDEICAKLSHVIKKQHRKSTLVDNTINLDENLTVSNIESFYSRKDTGVQKGDGFIHNLSLDPSGVLDDKNGEQKSQNNVLPKEKQLKNEELVIFSFHENNCKIQEFHVDGKELIPFTEMTNASEKKSSPFKDLMTVPESRDEEMSNSTSVIYSNLTREQAPDISPKSDTLTDSQIDRDLHKLSLLAQASVITFPSDSPQNSSQLQRKVKEDKRCFTANQNNVGDTSRGQVIIISDSDDDDDERILSLEKLTKQDKICLEREHPEQHVSTVNSKEEKNPVKEEKTETLFQFEESDSQCFEFESSSEVFSVWQDHPDDNNSVQDGEKKCLAPIANTTNGQGCTDYVSEVVKKGAEGIEEHTRPRSISVEEFCEIEVKKPKRKRSEKPMAEDPVRPSSSVRNEGQSDTNKRELVGNDFKSIDRRTSTPNSRIQRATTVSQKKSSKLCTCTEPIRKVPVSKTPKKTHSDAKKRQNRSSNYLSCRTTPAIVPPKKFRQCPEPTSTAEKLGLKKGPRKAYELSQRSLDYVAQLRDHGKTVGVVDTRKKTKLISPQNLSVRNNKKLLTSQELQMQRQIRPKSQKNRRRLSDCESTDVKRAGSHTAQNSDVFVPESDRSDYNCTGGTEVLANSNRKQLIKCMPSEPETIKAKHGSPATDDACPLNQCDSVVLNGTVPTNEVIVSTSEDPLGGGDPTARHIEMAALKEGEPDSSSDAEEDNLFLTQNDPEDMDLCSQMENDNYKLIELIHGKDTVEVEEDSVSRPQLESLSGTKCKYKDCLETTKNQGEYCPKHSEVKAADEDVFRKPGLPPPASKPLRPTTKIFSSKSTSRIAGLSKSLETSSALSPSLKNKSKGIQSILKVPQPVPLIAQKPVGEMKNSCNVLHPQSPNNSNRQGCKVPFGESKYFPSSSPVNILLSSQSVSDTFVKEVLKWKYEMFLNFGQCGPPASLCQSISRPVPVRFHNYGDYFNVFFPLMVLNTFETVAQEWLNSPNRENFYQLQVRKFPADYIKYWEFAVYLEECELAKQLYPKENDLVFLAPERINEEKKDTKRNDIQDLHEYHSGYVHKFRRTSVMRNGKTECYLSIQTQENFPANLNELVNCIVISSLVTTQRKLKAMSLLGSRNQLARAVLNPNPMDFCTKDLLTTTSERIIAYLRDFNEDQKKAIETAYAMVKHSPSVAKICLIHGPPGTGKSKTIVGLLYRLLTENQRKGHSDENSNAKIKQNRVLVCAPSNAAVDELMKKIILEFKEKCKDKKNPLGNCGDINLVRLGPEKSINSEVLKFSLDSQVNHRMKKELPSHVQAMHKRKEFLDYQLDELSRQRALCRGGREIQRQELDENISKVSKERQELASKIKEVQGRPQKTQSIIILESHIICCTLSTSGGLLLESAFRGQGGVPFSCVIVDEAGQSCEIETLTPLIHRCNKLILVGDPKQLPPTVISMKAQEYGYDQSMMARFCRLLEENVEHNMISRLPILQLTVQYRMHPDICLFPSNYVYNRNLKTNRQTEAIRCSSDWPFQPYLVFDVGDGSERRDNDSYINVQEIKLVMEIIKLIKDKRKDVSFRNIGIITHYKAQKTMIQKDLDKEFDRKGPAEVDTVDAFQGRQKDCVIVTCVRANSIQGSIGFLASLQRLNVTITRAKYSLFILGHLRTLMENQHWNQLIQDAQKRGAIIKTCDKNYRHDAVKILKLKPVLQRSLTHPPTIAPEGSRPQGGLPSSKLDSGFAKTSVAASLYHTPSDSKEITLTVTSKDPERPPVHDQLQDPRLLKRMGIEVKGGIFLWDPQPSSPQHPGATPPTGEPGFPVVHQDLSHIQQPAAVVAALSSHKPPVRGEPPAASPEASTCQSKCDDPEEELCHRREARAFSEGEQEKCGSETHHTRRNSRWDKRTLEQEDSSSKKRKLL

SEQ ID NO: 5630 - protein, 439 aa, Homo sapiens
MADPDVLTEVPAALKRLAKYVIRGFYGIEHALALDILIRNSCVKEEDMLELLKFDRKQLRSVLNNLKGDKFIKCRMRVETAADGKTTRHNYYFINYRTLVNVVKYKLDHMRRRIETDERDSTNRASFKCPVCSSTFTDLEANQLFDPMTGTFRCTFCHTEVEEDESAMPKKDARTLLARFNEQIEPIYALLRETEDVNLAYEILEPEPTEIPALKQSKDHAATTAGAASLAGGHHREAWATKGPSYEDLYTQNVVINMDDQEDLHRASLEGKSAKERPIWLRESTVQGAYGSEDMKEGGIDMDAFQEREEGHAGPDDNEEVMRALLIHEKKTSSAMAGSVGAAAPVTAANGDDSESETSESDDDSPPRPAAVAVHKREEDEEEDDEFEEVADDPIVMVAGRPFSYSEVSQRPELVAQMTPEEKEAYIAMGQRMFEDLFE

SEQ ID NO: 5631 - protein, 342 aa, Homo sapiens
MAASQAVEEMRSRVVLGEFGVRNVHTTDFPGNYSGYDDAWDQDRFEKNFRVDVVHMDENSLEFDMVGIDAAIANAFRRILLAEVPTMAVEKVLVYNNTSIVQDEILAHRLGLIPIHADPRLFEYRNQGDEEGTEIDTLQFRLQVRCTRNPHAAKDSSDPNELYVNHKVYTRHMTWIPLGNQADLFPEGTIRPVHDDILIAQLRPGQEIDLLMHCVKGIGKDHAKFSPVATASYRLLPDITLLEPVEGEAAEELSRCFSPGVIEVQEVQGKKVARVANPRLDTFSREIFRNEKLKKVVRLARVRDHYICKKDLLAAVAHTCNPSTLGGQGEWITGSRERDHPG

SEQ ID NO: 5632 - protein, 346 aa, Homo sapiens
MAASQAVEEMRSRVVLGEFGVRNVHTTDFPGNYSGYDDAWDQDRFEKNFRVDVVHMDENSLEFDMVGIDAAIANAFRRILLAEVPTMAVEKVLVYNNTSIVQDEILAHRLGLIPIHADPRLFEYRNQGDEEGTEIDTLQFRLQVRCTRNPHAAKDSSDPNELYVNHKVYTRHMTWIPLGNQADLFPEGTIRPVHDDILIAQLRPGQEIDLLMHCVKGIGKDHAKFSPVATASYRLLPDITLLEPVEGEAAEELSRCFSPGVIEVQEVQGKKVARVANPRLDTFSREIFRNEKLKKVVRLARVRDHYIFSVESTGVLPPDVLVSEAIKVLMGKCRRFLDELDAVQMD

SEQ ID NO: 5633 - protein, 274 aa, Homo sapiens
MIQCVVCEDWFHGRHLGAIPPESGDFQEMVCQACMKRCSFLWAYAAQLAVTKISTEDDGLVRNIDGIGDQEVIKPENGEHQDSTLKEDVPEQGKDDVREVKVEQNSEPCAGSSSESDLQTVFKNESLNAESKSGCKLQELKAKQLIKKDTATYWPLNWRSKLCTCQDCMKMYGDLDVLFLTDEYDTVLAYENKGKIAQATDRSDPLMDTLSSMNRVQQVELICEYNDLKTELKDYLKRFADEGTVVKREDIQQFFEEFQSKKRRRVDGMQYYCS

SEQ ID NO: 5634 - protein, 425 aa, Homo sapiens
MAGAEGAAGRQSELEPVVSLVDVLEEDEELENEACAVLGGGDSEKCSYSQGSVKRQALYACSTCTPEGEEPAGICLACSYECHGSHKLFELYTKRNFRCDCGNSKFKNLECKLLPDKAKVNSGNKYNDNFFGLYCICKRPYPDPEDEIPDEMIQCVVCEDWFHGRHLGAIPPESGDFQKMVCQACMKRCSFLWAYAAQLAVTKISTEDDGLVRNIDGIGDQEVIKPENGEHQDSTLKEDVPEQGKDDVREVKVEQNSEPCAGSSSESDLQTVFKNESLNAESKSGCKLQELKAKQLIKKDTATYWPLNWRSKLCTCQDCMKMYGDLDVLFLTDEYDTVLAYENRGKIAQATDRSDPLMDTLSSMNRVQQVELICEYNDLKTELKDYLKRFADEGTVVKREDIQQFFEEFQSKKRRRVDGMQYYCS

SEQ ID NO: 5635 - protein, 409 aa, Homo sapiens
MMKKNNSAKRGPQDGNQQPAPPEKVGWVRKFCGKGIFREIWKNRYVVLKGDQLYISEKEVKDEKNIQEVFDLSDYEKCEELRKSKSRSKKNHSKFTLAHSKQPGNTAPNLIFLAVSPEEKESWINALNSAITRAKNRILDEVTVEEDSYLAHPTRDRAKIQHSRRPPTRGHLMAVASTSTSDGMLTLDLIQEEDPSPEEPTSCAESFRVDLDKSVAQLAGSRRRADSDRIQPSADRASSLSRPWEKTDKGATYTPQAPKKLTPTEKGRCASLEEILSQRDAASARTLQLRAEEPPTPALPNPGQLSRIQDLVARKLEETQELLAEVQGLGDGKRKAKDPPRSPPDSESEQLLLETERLLGEASSNWSQAKRVLQEVRELRDLYRQMDLQTPDSHLRQTTPHSQYRKSLM

SEQ ID NO: 5636 - protein, 792 aa, Homo sapiens
MQGEDARYLKRKVKGGNIDVHPSEKALIVHYEVEATILGEMGDPMLGERKECQKIIRLKSLNANTDITSLARKVVEECKLIHPSKLNEVEQLLYYLQNRRDSLSGKEKKEKSSKPKDPPPFEGMEIDEVANINDMDEYIELLYEDIPDKVRGSALILQLARNPDNLEELLLNETALGALARVLREDWKQSVELATNIIYIFFCFSSFSQFHGLITHYKIGALCMNIIDHELKRHELWQEELSKKKKAVDEDPENQTLRKDYEKTFKKYQGLVVKQEQLLRVALYLLLNLAEDTRTELKMRNKNIVHMLVKALDRDNFELLILVVSFLKKLSIFMENKNDMVEMDIVEKLVKMIPCEHEDLLNITLRLLLNLSFDTGLRNKMVQVGLLPKLTALLGNDNYKQIAMCVLYHISMDDRFKSMFAYTDCIPQLMKMLFECSDERIDLELISFCINLAANKRNVQLICEGNGLKMLMKRALKFKDPLLMKMIRNISQHDGPTKNLFIDYVGDLAAQISNDEEEEFVIECLGTLANLTIPDLDWELVLKEYKLVPYLKDKLKPGAAEDDLVLEVVIMIGTVSMDDSCAALLAKSGIIPALIELLNAQQEDDEFVCQIIYVFYQMVFHQATRDVIIKETQAPAYLIDLMHDKNNEIRKVCDNTLDIIAEYDEEWAKKIQSEKFRWHNSQWLEMVESRQMDESEQYLYGDDRIEPYIHEGDILERPDLFYNSDGLIASEGAISPDFFNDYHLQNGDVVGQHSFPGSLGMDGFGQPVGILGRPATAYGFRPDEPYYYGYGS

SEQ ID NO: 5637 - protein, 897 aa, Homo sapiens
MNISGSSCGSPNSADTSSDFKDLWTKLKECHDREVQGLQVKVTKLKQERILDAQRLEEFFTKNQQLREQQKVLHETIKVLEDRLRAGLCDRCAVTEEHMRKKQQEFENIRQQNLKLITELMNERNTLQEENKKLSEQLQQKIENDQQHQAAELECEEDVIPDSPITAFSFSGVNRLRRKENPHVRYIEQTHTKLEHSVCANEMRKVSKSSTHPQHNPNENEILVADTYDQSQSPMAKAHGTSSYTPDKSSFNLATVVAETLGLGVQEESETQGPMSPLGDELYHCLEGNHKKQPFEESTRNTEDSLRFSDSTSKTPPQEELPTRVSSPVFGATSSIKSGLDLNTSLSPSLLQPGKKKHLKTLPFSNTCISRLEKTRSKSEDSALFTHHSLGSEVNKIIIQSSNKQILINKNISESLGEQNRTEYGKDSNTDKHLEPLKSLGGRTSKRKKTEEESEHEVSCPQASFDKENAFPFPMDNQFSMNGDCVMDKPLDLSDRFSAIQRQEKSQGSETSKNKFRQVTLYEALKTIPKGFSSSRKASDGNCTLPKDSPGEPCSQECIILQPLNKCSPDNKPSLQIKEENAVFKIPLRPRESLETENVLDDIKSAGSHEPIKIQTRSDHGGCELASVLQLNPCRTGKIKSLQNNQDVSFENIQWSIDPGADLSQYKMDVTVIDTKDGSQSKLGGETVDMDCTLVSETVLLKMKKQEQKGEKSSNEERKMNDSLEDMFDRTTHEEYESCLADSFSQAADEEEELSTATKKLHTHGDKQDKVKQKAFVEPYFKGDERETSLQNFPHIEVVRKKEERRKLLGHTCKECEIYYADMPAEEREKKLASCSRHRFRYIPPNTPENFWEVGFPSTQTCMERGYIKEDLDPCPRPKRRQPYNAIFSPKGKEQKT

SEQ ID NO: 5638 - protein, 897 aa, Homo sapiens; identical to SEQ ID NO: 5637

SEQ ID NO: 5639 - protein, 867 aa, Homo sapiens
MNISGSSCGSPNSADTSSDFKDLWTKLKECHDREVQGLQVKVTKLKQERILDAQRLEEFFTKNQQLREQQKVLHETIKVLEDRLRAGLCDRCAVTEEHMRKKQQEFENIRQQNLKLITELMNERNTLQEENKKLSEQLQQKIENDQQHQAAELECEEDVIPDSPITAFSFSGVNRLRRKENPHVRYIEQTHTKLEHSVCANEMRKVSKSSTHPQHNPNENEILVADTYDQSQSPMAKAHGTSSYTPDKSSFNLATVVAETLGLGVQEESETQGPMSPLGDELYHCLEGNHKKQPFEESTRNTEDSLRFSDSTSKTPPQEELPTRVSSPVFGATSSIKSGLDLNTSLSPSLLQPGKKKHLKTLPFSNTCISRLEKTRSKSEDSALFTHHSLGSEVNKIIIQSSNKQILINKNISESLGEQNRTEYGKDSNTDKHLEPLKSLGGRTSKRKKTEEESEHEVSCPQASFDKENAFPFPMDNQFSMNGDCVMDKPLDLSDRFSAIQRQEKSQGSETSKNKFRQVTLYEALKTIPKGFSSSRKASDGNCTLPKDSPGEPCSQECIILQPLNKCSPDNKPSLQIKEENAVFKIPLRPRESLETENVLDDIKSAGSHEPIKIQTRSDHGGCELASVLQLNPCRTGKIKSLQNNQDVSFENIQWSIDPGADLSQYKMDVTVIDTKDGSQSKLGGETVDMDCTLVSETVLLKMKKQEQKGEKSSNEERKMNDSLEDMFDRTTHEEYESCLADSFSQAADEEEELSTATKKLHTHGDKQDKVKQKAFVEPYFKGDESIMQICQQKKEKRNWLPAQDTDSATFHPTHQRIFGKLVFLPLRLVWKEVILRKILILVLVQKDVSLTTQYFLQKARSRRHRR

SEQ ID NO: 5640 - protein, 586 aa, Homo sapiens
MATATPVPPRMGSRAGGPTTPLSPTRLSRLQEKEELRELNDRLAVYIDKVRSLETENSALQLQVTEREEVRGRELTGLKALYETELADARRALDDTARERAKLQIELGKCKAEHDQLLLNYAKKESDLNGAQIKLREYEAALNSKDAALATALGDKKSLEGDLEDLKDQIAQLEASLAAAKKQLADETLLKVDLENRCQSLTEDLEFRKSMYEEEINETRRKHETRLVEVDSGRQIEYEYKLAQALHEMREQHDAQVRLYKEELEQTYHAKLENARLSSEMNTSTVNSAREELMESRMRIESLSSQLSNLQKESRACLERIQELEDLLAKEKDNSRRMLTDKEREMAEIRDQMQQQLNDYEQLLDVKLALDMEISAYRKLLEGEEERLKLSPSPSSRVTVSRASSSRSVRTTRGKRKRVDVEESEASSSVSISHSASATGNVCIEEIDVDGKFIRLKNTSEQDQPMGGWEMIRKIGDTSVSYKYTSRYVLKAGQTVTIWAANAGVTASPPTDLIWKNQNSWGTGEDVKVILKNSQGEEVAQRSTVFKTTIPEEEEEEEEAAGVVVEEELFHQQGTPRASNRSCAIM

SEQ ID NO: 5641 - protein, 207 aa, Homo sapiens
MAKTYDYLFKLLLIGDSGVGKTCLLFRFSEDAFNTTFISTIGIDFKIRTIELDGKKIKLQIWDTAGQERFRTITTAYYRGAMGIMLVYDITNEKSFDNIKNWIRNIEEHASSDVERMILGNKCDMNDKRQVSKERGEKLAIDYGIKFLETSAKSSANVEEAFFTLARDIMTKLNRKMNDSNSAGAGGPVKITENRSKKTSFFRCSLL

SEQ ID NO: 5642 - protein, 1241 aa, Homo sapiens
MSSAPRRPAKGADSFCTPEPESLGPGTPGFPEQEEDELHRTLGVERFEEILQEAGSRGGEEPGRSYGEEDFEYHRQSSHHIHHPLSTHLPPDARRRKTPQGPGRKPRRRPGASPTGETPTIEEGEEDEDEASEAEGARALTQPSPVSTPSSVQFFLREDDSADRKAERTSPSSPAPLPHQEATPRASKGAQAGTQVEEAEAEAVAVASGTAGGDDGGASGRPLPKAQPGHRSYNLQERRRIGSMTGAEQALLPRVPTDEIEAQTLATADLDLMKSHRFEDVPGVRRHLVRKNAKGSTQSGREGREPGPTPRARPRAPHKPHEVFVELNELLLDKNQEPQWRETARWIKFEEDVEEETERWGKPHVASLSFRSLLELRRTLAHGAVLLDLDQQTLPGVAHQVVEQMVISDQIKAEDRANVLRALLLKHSHPSDEKDFSFPRNISAGSLGSLLGHHHGQGAESDPHVTEPLMGGVPETRLEVERERDVPPPAPPAGITRSKSKHELKLLEKIPENAEATVVLVGCVEFLSRPTMAFVRLREAVELDAVLEVPVPVRFLFLLLGPSSANMDYHEIGRSISTLMSDKQFHEAAYLADEREDLLTAINAFLDCSVVLPPSEVQGEELLRSVAHFQRQMLKKREEQGRLLPTGAGLEPKSAQDKALLQMVEAAGAAEDDPLRRTGRPFGGLIRDVRRRYPHYLSDFRDALDPQCLAAVIFIYFAALSPAITFGGLLGEKTQDLIGVSELIMSTALQGVVFCLLGAQPLLVIGFSGPLLVFEEAFFSFCSSNHLEYLVGRVWIGFWLVFLALLMVALEGSFLVRFVSRFTQEIFAFLISLIFIYETFYKLVKIFQEHPLHGCSASNSSEVDGGENMTWAGARPTLGPGNRSLAGQSGQGKPRGQPNTALLSLVLMAGTFFIAFFLRKFKNSRFFPGRIRRVIGDFGVPIAILIMVLVDYSIEDTYTQKLSVPSGFSVTAPEKRGWVINPLGEKSPFPVWMMVASLLPAILVFILIFMETQITTLIISKKERMLQKGSGFHLDLLLIVAMGGICALFGLPWLAAATVRSVTHANALTVMSKAVAPGDKPKIQEVKEQRVTGLLVALLVGLSIVIGDLLRQIPLAVLFGIFLYMGVTSLNGIQFYERLHLLLMPPKHHPDVTYVKKVRTLRMHLFTALQLLCLALLWAVMSTAASLAFPFILILTVPLRMVVLTRIFTDREMKCLDANEAEPVFDEREGVDEYNEMPMPV

SEQ ID NO: 5643 - protein, 443 aa, Homo sapiens
MSDMEDDFMCDDEEDYDLEYSEDSNSEPNVDLENQYYNSKALKEDDPKAALSSFQKVLELEGEKGEWGFKALKQMIKINFKLTNFPEMMNRYKQLLTYIRSAVTRNYSEKSINSILDYISTSKQMDLLQEFYETTLEALKDAKNDRLWFKTNTKLGKLYLEREEYGKLQKILRQLHQSCQTDDGEDDLKKGTQLLEIYALEIQMYTAQKNNKKLKALYEQSLHIKSAIPHPLIMGVIRECGGKMHLREGEFEKAHTDFFEAFKNYDESGSPRRTTCLKYLVLANMLMKSGINPFDSQEAKPYKNDPEILAMTNLVSAYQNNDITEFEKILKTNHSNIMDDPFIREHIEELLRNIRTQVLIKLIKPYTRIHIPFISKELNIDVADVESLLVQCILDNTIHGRIDQVNQLLELDHQKRGGARYTALDKWTNQLNSLNQAVVSKLA

SEQ ID NO: 5644 - protein, 365 aa, Homo sapiens
MVTTIVLGRRFIGSIVKEASQRGKVSLFRSILLFLTRFTVLTATGWSLCRSLIHLFRTYSFLNLLFLCYPFGMYIPFLQLNCDLRKTSLFNHMASMGPREAVSGLAKSRDYLLTLRETWKQHTRQLYGPDAMPTHACCLSPSLIRSEVEFLKMDFNWRMKEVLVSSMLSAYYVAFVPVWFVKNTHYYDKRWSCELFLLVSISTSVILMQHLLPASYCDLLHKAAAHLGCWQKVDPALCSNVLQHPWTEECMWPQGVLVKHSKNVYKAVGHYNVAIPSDVSHFRFHFFFSKPLRILNILLLLEGAVIVYQLYSLMSSEKWHQTISLALILFSNYYAFFKLLRDRLVLGKAYSYSASPQRDLDHRFS

SEQ ID NO: 5645 - protein, 238 aa, Homo sapiens
MAADGQCSLPASWRPVTLTHVEYPAGDLSGHLLAYLSLSPVFVIVGFVTLIIFKRELHTISFLGGLALNEGVNWLIKNVIQEPRPCGGPHTAVGTKYGMPSSHSQFMWFFSVYSFLFLYLRMHQTNNARFLDLLWRHVLSLGLLAVAFLVSYSRVYLLYHTWSQVLYGGIAGGLMAIAWFIFTQEVLTPLFPRIAAWPVSEFFLIRDTSLIPNVLWFEYTVTRAEARNRQRKLGTKLQ

SEQ ID NO: 5646 - protein, 195 aa, Homo sapiens
MSRPLGQSRRRPPDPIARWQRSRRLQAEGPAGVPLGEPVFPQGLLQAQPALGVVLAQESLGTAWVTERDSVSKKKKKAWVTMSLFQEWFLHFCSTVEGAAPSTTFPTRGCPSWTALPATLGVETESGSVAQAGVRWRDLGSLQPPPPGFTPFSCLSLPGSWDYRRPPPRPANFFVFLVETGFHRVSQNGLGLLTP

SEQ ID NO: 5647 - protein, 393 aa, Homo sapiens [sequence omitted]

SEQ ID NO: 5648 - protein, 78 aa, Homo sapiens
MSESELGRKWDRCLADAVVKIGTGFGLGIVFSLTFFKRRMWPLAFGSGMGLGMAYSNCQHDFQAPYLLHGKYVKEQEQ

SEQ ID NO: 5649 - protein, 332 aa, Homo sapiens
MKLGRAVLGLLLLAPSVVQAVEPISLGLALAGVLTGYIYPRLYCLFAECCGQKRSLSREALQKDLDDNLFGQHLAKKIILNAVFGFINNPKPKKPLTLSLHGWTGTGKNFVSKIIAENIYEGGLNSDYVHLFVATLHFPHASNITLYKDQLQLWIRGNVSACARSIFIFDEMDKMHAGLIDAIKPFLDYYDLVDGVSYQKAMFIFLSNAGAERITDVALDFWRSGKQREDIKLKDIEHALSVSVFNNKNSGFWHSSLIDRNLIDYFVPFLPLEYKHLKMCIRVEMQSRGYEIDEDIVSRVAEEMTFFPKEERVFSDKGCKTVFTKLDYYYDD

SEQ ID NO: 5650 - protein, 775 aa, Homo sapiens
MAALDSLSLFTSLGLSEQKARETLKNSALSAQLREAATQAQQTLGSTIDKATGILLYGLASRLRDTRRLSFLVSYIASKKIHTEPQLSAALEYVRSHPLDPIDTVDFERECGVGVIVTPEQIEEAVEAAINRHRPQLLVERYHFNMGLLMGEARAVLKWADGKMIKNEVDMQVLHLLGPKLEADLEKKFKVAKARLEETDRRTAKDVVENGETADQTLSLMEQLRGEALKFHKPGENYKTPGYVVTPHTMNLLKQHLEITGGQVRTRFPPEPNGILHIGHAKAINFNFGYAKANNGICFLRFDDTNPEKEEAKFFTAICDMVAWLGYTPYKVTYASDYFDQLYAWAVELIRRGLAYVCHQRGEELKGHNTLPSPWRDRPMEESLLLFEAMRKGKFSEGEATLRMKLVMEDGKMDPVAYRVKYTPHHRTGDKWCIYPTYDYTHCLCDSIEHITHSLCTKEFQARRSSYFWLCNALDVYCPVQWEYGRLNLHYAVVSKRKILQLVATGAVRDWDDPRLFTLTALRRRGFPPEAINNFCARVGVTVAQTTMEPHLLEACVRDVLNDTAPRAMAVLESLRVIITNFPAAKSLDIQVPNFPADETKGFHQVPFAPIVFIERTDFKEEPEPGFKRLAWGQPVGLRHTGYVIELQHVVKGPSGCVESLEVTCRRADAGEKPKAFIHWVSQPLMCEVRLYERLFQHKNPEDPTEVPGGFLSDLNLASLHVVDAALVDCSVALAKPFDKFQFERLGYFSVDPDSHQGKLVFNRTVTLKEDPGKV

SEQ ID NO: 5651 - protein, 940 aa, Homo sapiens
MGSGPIDPKELLKGLDSFLNRDGEVKSVDGISKIFSLMKEARKMVSRCTYLNILLQTRSPEILVKFIDVGGYKLLNNWLTYSKTTNNIPLLQQILLTLQHLPLTVDHLKQNNTAKLVKQLSKSSEDEELRKLASVLVSDWMAVIRSQSSTQPAEKDKKKRKDEGKSRTTLPERPLTEVKAETRAEEAPEKKREKPKSLRTTAPSHAKFRSTGLELETPSLVPVKKNASTVVVSDKYNLKPIPLKRQSNVAAPGDATPPAEKKYKPLNTTPNATKEIKVKIIPPQPMEGLGFLDALNSAPVPGIKIKKKKKVLSPTAAKPSPFEGKTSTEPSTAKPSSPEPAPPSEAMDADRPGTPVPPVEVPELMDTASLEPGALDAKPVESPGDPNQLTRKGRKRKSVTWPEEGKLREYFYFELDETERVNVNKIKDFGEAAKREILSDRHAFETARRLSHDNMEEKVPWVCPRPLVLPSPLVTPGSNSQERYIQAEREKGILQELFLNKESPHEPDPEPYEPIPPKLIPLDEECSMDETPYVETLEPGGSGGSPDGAGGSKLPPVLANLMGSMGAGKGPQGPGGGGINVQEILTSIMGSPNSHPSEELLKQPDYSDKIKQMLVPHGLLGPGPIANGFPPGGPGGPKGMQHFPPGPGGPMPGPHGGPGGPVGPRLLGPPPPPRGGDPFWDGPGDPMRGGPMRGGPGPGPGPYHRGRGGRGGNEPPPPPPPFRGARGGRSGGGPPNGRGGPGGGMVGGGGHRPHEGPGGGMGNSSGHRPHEGPGGGMGSGHRPHEGPGGSMGGGGGHRPHEGPGGGISGGSGHRPHEGPGGGMGAGGGHRPHEGPGGSMGGSGGHRPHEGPGHGGPHGHRPHDVPGHRGHDHRGPPPHEHRGHDGPGHGGGGHRGHDGGHSHGGDMSNRPVCRHFMMKGNCRYENNCAFYHPGVNGPPLP

SEQ ID NO: 5652 - protein, 406 aa, Homo sapiens
MTLDVGPEDELPDWAAAKEFYQKYDPKDVIGRGVSSVVRRCVHRATGHEFAVKIMEVTAERLSPEQLEEVREATRRETHILRQVAGHPHIITLIDSYESSSFMFLVFDLMRKGELFDYLTEKVALSEKETRSIMRSLLEAVSFLHANNIVHRDLKPENILLDDNMQIRLSDFGFSCHLEPGEKLRELCGTPGYLAPEILKCSMDETHPGYGKEVDLWACGVILFTLLAGSPPFWHRRQILMLRMIMEGQYQFSSPEWDDRSSTVKDLISRLLQVDPEARLTAEQALQHPFFERCEGSQPWNLTPRQRFRVAVWTVLAAGRVALSTHRVRPLTKNALLRDPYALRSVRHLIDNCAFRLYGHWVKKGEQQNRAALFQHRPPGPFPIMGPEEEGDSAAITEDEAVLVLG

SEQ ID NO: 5653 - protein, 509 aa, Homo sapiens
MGCSAKARWAAGALGVAGLLCAVLGAVMIVMVPSLIKQQVLKNVRIDPSSLSFNMWKEIPIPFYLSVYFFDVMNPSEILKGEKPQVRERGPYVYRESRHKSNITFNNNDTVSFLEYRTFQFQPSKSHGSESDYIVMPNILVLGAAVMMENKPMTLKLIMTLAFTTLGERAFMNRTVGEIMWGYKDPLVNLINKYFPGMFPFKDKFGLFAELNNSDSGLFTVFTGVQNISRIHLVDKWNGLSKVDFWHSDQCNMINGTSGQMWPPFMTPESSLEFYSPEACRSMKLMYKESGVFEGIPTYRFVAPKTLFANGSIYPPNEGFCPCLESGIQNVSTCRFSAPLFLSHPHFLNADPVLAEAVTGLHPNQEAHSLFLDIHPVTGIPMNCSVKLQLSLYMKSVAGIGQTGKIEPVVLPLLWFAESGAMEGETLHTFYTQLVLMPKVMHYAQYVLLALGCVLLLVPVICQIRSQEKCYLFWSSSKKGSKDKEAIQAYSESLMTSAPKGSVLQEAKL

SEQ ID NO: 5654 - protein, 324 aa, Homo sapiens
MDRSLPVFSIQDSPFGDAPLGRSHYWPSQSQTWCPKTLSPSRSQRSRLPQAPKALATGPNSPELFEESWPSSSGTPSLPSTTEGQMWASPAPTLIDSGDSVVAKYINRFRQAQPTSREERQPAGPTPADFWWLQSDSPDPSSQSAAGANKPEGRPHTAVPTAVNVTSASHAVAPLQEIKQNLHTWNSSLLDLETLSLQSRAARLLKRSSSDASTSSFPTSSDGLSPFSETFIPDSSKGLGPRAPASPAPAQAQTPTPAPAPASSQAPLRPEDDILYQWRQRRKLEQAQGSKGDRAWVPPLTPALRTLVSRGREEPGGSWRRGWV

SEQ ID NO: 5655 - protein, 443 aa, Homo sapiens
MEEDSLEDSNLPPKVWHSEMTVSVTGEPPSTVEEEGIPKETDIEIIPEIPETLEPLSLPDVLRISAVLEDTTDQLSILNYIMPVQYEGRQSICVKSREMNLEGTNLDKLPMASTITKIPSPLITEEGPNLPEIRHRGRFAVEFNKMQDLVFKKPTRQTIMTTETLKKIQIDRQFFSDVIADTIKELQDSATYNSLLQALSKERENKMHFYDIIAREEKGRKQIISLQKQLINVKKEWQFEVQSQNEYIANLKDQLQEMKAKSNLENRYMKTNTELQIAQTQKKCNRTEELLVEEIEKLRMKTEEEARTHTEIEMFLRKEQQKLEERLEFWMEKYDKDTEMKQNELNALKATKASDLAHLQDLAKMIREYEQVIIEDRIEKERSKKKVKQDLLELKSVIKLQAWWRGTMIRREIGGFKMPKDKVDSKDSKGKGKGKDKRRGKKK

SEQ ID NO: 5656 - protein, 88 aa, Homo sapiens
MANSLRGEVLKLYKNLLYLGRDYPKGADYFKKRLKNIFLKNKDVKNPEKIKELIAQGEFVMKELEALYFLRKYRAMKQRYYSDTNKTN

SEQ ID NO: 5657 - protein, 3259 aa, Homo sapiens
MLSRLSGLANVVLHELSGDDDTDQNMRAPLDPELHQESDMEFNNTTQEDVQERLAYAEQLVVELKDIIRQKDVQLQQKDEALQEERKAADNKIKKLKLHAKAKLTSLNKYIEEMKAQGGTVLPTEPQSEEQLSKHDKSSTEEEMEIEKIKHKLQEKEELISTLQAQLTQAQAEQPAQSSTEMEEFVMMKQQLQEKEEFISTLQAQLSQTQAEQAAQQVVREKDARFETQVRLHEDELLQLVTQADVETEMQQKLRVLQRKLEEHEESLVGRAQVVDLLQQELTAAEQRNQILSQQLQQMEAEHNTLRNTVETEREESKILLEKMELEVAERKLSFHNLQEEMHHLLEQFEQAGQAQAELESRYSALEQKHKAEMEEKTSHILSLQKTGQELQSACDALKDQNSKLLQDKNEQAVQSAQTIQQLEDQLQQKSKEISQFLNRLPLQQHETASQTSFPDVYNEGTQAVTEENIASLQKRVVELENEKGALLLSSIELEELKAENEKLSSQITLLEAQNRTGEADREVSEISIVDIANKRSSSAEESGQDVLENTFSQKHKELSVLLLEMKEAQEEIAFLKLQLQGKRAEEADHEVLDQKEMKQMEGEGIAPIKMKVFLEDTGQDFPLMPNEESSLPAVEKEQASTEHQSRTSEEISLNDAGVELKSTKQDGDKSLSAVPDIGQCHQDELERLKSQILELELNFHKAQEIYEKNLDEKAKEISNLNQLIEEFKKNADNNSSAFTALSEERDQLLSQVKELSMVTELRAQVKQLEMNLAEAERQRRLDYESQTAHDNLLTEQIHSLSIEAKSKDVKIEVLQNELDDVQLQFSEQSTLIRSLQSQLQNKESEVLEGAERVRHISSKVEELSQALSQKELEITKMDQLLLEKKRDVETLQQTIEEKDQQVTEISFSMTEKMVQLNEEKFSLGVEIKTLKEQLNLLSRAEEAKKEQVEEDNEVSSGLKQNYDEMSPAGQISKEELQHEFDLLKKENEQRKRKLQAALINRKELLQRVSRLEEELANLKDESKKEIPLSETERGEVEEDKENKEYSEKCVTSKCQEIEIYLKQTISEKEVELQHIRKDLEEKLAAEEQFQALVKQMNQTLQDKTNQIDLLQAEISENQAIIQKLITSNTDASDGDSVALVKETVVISPPCTGSSEHWKPELEEKILALEKEKEQLQKKLQEALTSRKAILKKAQEKERHLREELKQQKDDYNRLQEQFDEQSKENENIGDQLRQLQIQVRESIDGKLPSTDQQESCSSTPGLEEPLFKATEQHHTQPVLESNLCPDWPSHSEDASALQGGTSVAQIKAQLKEIEAEKVELELKVSSTTSELTKKSEEVFQLQEQINKQGLEIESLKTVSHEAEVHAESLQQKLESSQLQIAGLEHLRELQPKLDELQKLISKKEEDVSYLSGQLSEKEAALTKIQTEIIEQEDLIKALHTQLEMQAKEHDERIKQLQVELCEMKQKPEEIGEESRAKQQIQRKLQAALISRKEALKENKSLQEELSLARGTIERLTKSLADVESQVSAQNKEKDTVLGRLALLQEERDKLITEMDRSLLENQSLSSSCESLKLALEGLTEDKEKLVKEIESLKSSKIAESTEWQEKHKELQKEYEILLQSYENVSNEAERIQHVVEAVRQEKQELYGKLRSTEANKKETEKQLQEAEQEMEEMKEKMRKFAKSKQQKILELEEENDRLRAEVHPAGDTAKECMETLLSSNASMKEELERVKMEYETLSKKFQSLMSEKDSLSEEVQDLKHQIEDNVSKQANLEATEKHDNQTNVTEEGTQSIPGETEEQDSLSMSTRPTCSESVPSAKSANPAVSKDFSSHDEINNYLQQIDQLKERIAGLEEEKQKNKEFSQTLENEKNTLLSQISTKDGELKMLQEEVTKMNLLNQQIQEELSRVTKLKETAEEEKDDLEERLMNQLAELNGSIGNYCQDVTDAQIKNELLESEMKNLKKCVSELEEEKQQLVKEKTKVESEIRKEYLEKIQGAQKEPGNKSHAKELQELLKEKQQEVKQLQKDCIRYQEKISALERTVKALEFVQTESQKDLEITKENLAQAVEHRKKAQAELASFKVLLDDTQSEAARVLADNLKLKKELQSNKESVKSQMKQKDEDLERRLEQAEEKHLKEKKNMQEKLDALRREKVHLEETIGEIQVTLNKKDKEVQQLQENLDSTVTQLAAFTKSMSSLQDDRDRVIDEAKKWERKFSDAIQSKEEEIRLKEDNCSVLKDQLRQMSIHMEELKINISRLEHDKQIWESKAQTEVQLQQKVCDTLQGENKELLSQLEETRHLYHSSQNELAKLESELKSLKDQLTDLSNSLEKCKEQKGNLEGIIRQQEADIQNSKFSYEQLETDLQASRELTSRLHEEINMKEQKIISLLSGKEEAIQVAIAELRQQHDKEIKELENLLSQEEEENIVLEEENKKAVDKTNQLMETLKTIKKENIQQKAQLDSFVKSMSSLQNDRDRIVGDYQQLEERHLSIILEKDQLIQEAAAENNKLKEEIRGLRSHMDDLNSENAKLDAELIQYREDLNQVITIKDSQQKQLLEVQLQQNKELENKYAKLEEKLKESEEANEDLRRSFNALQEEKQDLSKEIESLKVSISQLTRQVTALQEEGTLGLYHAQLKVKEEEVHRLSALFSSSQKRIAELEEELVCVQKEAAKKVGEIEDKLKKELKHLHHDAGIMRNETETAEERVAELARDLVEMEQKLLMVTKENKGLTAQIQSFGRSMSSLQNSRDHANEELDELKRKYDASLKELAQLKEQGLLNRERDALLSETAFSMNSTEENSLSHLEKLNQQLLSKDEQLLHLSSQLEDSYNQVQSFSKAMASLQNERDHLWNELEKFRKSEEGKQRSAAQPSTSPAEVQSLKKAMSSLQNDRDRLLKELKNLQQQYLQINQEITELHPLKAQLQEYQDKTKAFQIMQEELRQENLSWQHELHQLRMEKSSWEIHERRMKEQYLMAISDKDQQLSHLQNLIRELRSSSSQTQPLKVQYQRQASPETSASPDGSQNLVYETELLRTQLNDSLKEIHQKELRIQQLNSNFSQLLEEKNTLSIQLCDTSQSLRENQQHYGDLLNHCAVLEKQVQELQAGPLNIDVAPGAPQEKNGVHRKSDPEELREPQQSFSEAQQQLCNTRQEVNELRKLLEEERDQRVAAENALSVAEEQIRRLEHSEWDSSRTPIIGSCGTQEQALLIDLTSNSCRRTRSGVGWKRVLRSLCHSRTRVPLLAAIYFLMIHVLLILCFTGHL

SEQ ID NO: 5658 - protein, 413 aa, Homo sapiens
MSFRDLRNFTEMMRALGYPRHISMENFRTPNFGLVSEVLLWLVKRYEPQTDIPPDVDTEQDRVFFIKAIAQFMATKAHIKLNTKKLYQADGYAVKELLKITSVLYNAMKTKGMEGSEIVEEDVNKFKFDLGSKIADLKAARQLASEITSKGASLYDLLGMEVELREMRTEAIARPLEINETEKVMRIAIKEILTQVQKTKDLLNNVASDEANLEAKIEKRKLELERNRKRLETLQSVRPCFMDEYEKTEEELQKQYDTYLEKFQNLTYLEQQLEDHHRMEQERFEEAKNTLCLIQNKLKEEEKRLLKSGSNDDSDIDIQEDDESDSELEERRLPKPQTAMEMLMQGRPGKRIVGTMQGGDSDDNEDSEESEIDMEDDDDEDDDLEDESISLSPTKPNRRVRKSEPLDESDNDF

SEQ ID NO: 5659 - protein, 247 aa, Homo sapiens
MRTEAIARPLEINETEKVMRIAIKEILTQVQKTKDLLNNVASDEANLEAKIEKRKLELERNRKRLETLQSVRPCFMDEYEKTEEELQKQYDTYLEKFQNLTYLEQQLEDHHRMEQERFEEAKNTLCLIQNKLKEEEKRLLKSGSNDDSDIDIQEDDESDSELEERRLPKPQTAMEMLMQGRPGKRIVGTMQGGDSDDNEDSEESEIDMEDDDDEDDDLEDESISLSPTKPNRRVRKSEPLDESDNDF

SEQ ID NO: 5660 - protein, 343 aa, Homo sapiens
MESKYKEILLLTGLDNITDEELDRFKFFLSDEFNIATGKLHTANRIQVATLMIQNAGAVSAVMKTIRIFQKLNYMLLAKRLQEEKEKVDKQYKSVTKPKPLSQAEMSPAASAAIRNDVAKQRAAPKVSPHVKPEQKQMVAQQESIREGFQKRCLPVMVLKAKKPFTFETQEGKQEMFHATVATEKEFFFVKVFNTLLKDKFIPKRIIIIARYYRHSGFLEVNSASRVLDAESDQKVNVPLNIIRKAGETPKINTLQTQPLGTIVNGLFVVQKVTEKKKNILFDLSDNTGKMEVLGVRNEDTMKCKEGDKVRLTFFTLSKNGEKLQLTSGVHSTIKVIKAKKKT

SEQ ID NO: 5661 - protein, 221 aa, Homo sapiens
MEAGGFLDSLIYGACVVFTLGMFSAGLSDLRHMRMTRSVDNVRFLPFLTTEVNNLGWLSYGALKGDGILIVVNTVGAALQTLYILAYLHYCPRKRVVLLQTATLLGVLLLGYGYFWLLVPNPEARLQQLGLFCSVFTISMYLSPLADLAKVIQTKSTQCLSYPLTIATLLTSASWCLYGFRLRDPYIMVSNFPGIVTSFIRFWLFWKYPQEQDRNYWLLQT

SEQ ID NO: 5662 - protein, 1192 aa, Homo sapiens
MFCSEKKLREVERIVKANDREYNEKFQYADNRIHTSKYNILTFLPINLFEQFQRVANAYFLCLLILQLIPEISSLTWFTTIVPLVLVITMTAVKDATDDYFRHKSDNQVNNRQSEVLINSKLQNEKWMNVKVGDIIKLENNQFVAADLLLLSSSEPHGLCYVETAELDGETNLKVRHALSVTSELGADISRLAGFDGIVVCEVPNNKLDKFMGILSWKDSKHSLNNEKIILRGCILRNTSWCFGMVIFAGPDTKLMQNSGKTKFKRTSIDRLMNTLVLWIFGFLICLGIILAIGNSIWESQTGDQFRTFLFWNEGEKSSVFSGFLTFWSYIIILNTVVPISLYVSVEVIRLGHSYFINWDRKMYYSRKAIPAVARTTTLNEELGQIEYIFSDKTGTLTQNIMTFKRCSINGRIYGEVHDDLDQKTEITQEKEPVDFSVKSQADREFQFFDHHLMESIKMGDPKVHEFLRLLALCHTVMSEENSAGELIYQVQSPDEGALVTAARNFGFIFKSRTPETITIEELGTLVTYQLLAFLDFNNTRKRMSVIVRNPEGQIKLYSKGADTILFEKLHPSNEVLLSLTSDHLSEFAGEGLRTLAIAYRDLDDKYFKEWHKMLEDANAATEERDERIAGLYEEIERDLMLLGATAVEDKLQEGVIETVTSLSLANIKIWVLTGDKQETAINIGYACNMLTDDMNDVFVIAGNNAVEVREELRKAKQNLFGQNRNFSNGHVVCEKKQQLELDSIVEETITGDYALIINGHSLAHALESDVKNDLLELACMCKTVICCRVTPLQKAQVVELVKKYRNAVTLAIGDGANDVSMIKSAHIGVGISGQEGLQAVLASDYSFAQFRYLQRLLLVHGRWSYFRMCKFLCYFFYKNFAFTLVHFWFGFFCGFSAQTVYDQWFITLFNIVYTSLPVLAMGIFDQDVSDQNSVDCPQLYKPGQLNLLFNKRKFFICVLHGIYTSLVLFFIPYGAFYNVAGEDGQHIADYQSFAVTMATSLVIVVSVQIALDTSYWTFINHVFIWGSIAIYFSILFTMHSNGIFGIFPNQFPFVGNARHSLTQKCIWLVILLTTVASVMPVVAFRFLKVDLYPTLSDQIRRWQKAQKKARPPSSRRPRTRRSSSRRSGYAFAHQEGYGELITSGKNMRAKNPPPTSGLEKTHYNSTSWIENLCKKTTDTVSSFSQDKTVKL

SEQ ID NO: 5663 - protein, 234 aa, Homo sapiens
MNHLPEDMENALTGSQSSHASLRNIHSINPTQLMARIESYEGREKKGISDVRRTFCLFVTFDLLFVTLLWIIELNVNGGIENTLEKEVMQYDYYSSYFDIFLLAVFRFKVLILAYAVCRLRHWWAIALTTAVTSAFLLAKVILSKLFSQGAFGYVLPIISFILAWIETWFLDFKVLPQEAEEENRLLIVQDASERAALIPGGLSDGQFYSPPESEAGSEEAEEKQDSEKPLLEL

SEQ ID NO: 5664 - protein, 717 aa, Homo sapiens
MSRRSQRLTRYSQGDDDGSSSSGGSSVAGSQSTLFKDSPLRTLKRKSSNMKRLSPAPQLGPSSDAHTSYYSESLVHESWFPPRSSLEELHGDANWGEDLRVRRRRGTGGSESSRASGLVGRKATEDFLGSSSGYSSEDDYVGYSDVDQQSSSSRLRSAVSRAGSLLWMVATSPGRLFRLLYWWAGTTWYRLTTAASLLDVFVLTRRFSSLKTFLWFLLPLLLLTCLTYGAWYFYPYGLQTFHPALVSWWAAKDSRRPDEGWEARDSSPHFQAEQRVMSRVHSLERRLEALAAEFSSNWQKEAMRLERLELRQGAPGQGGGGGLSHEDTLALLEGLVSRREAALKEDFRRETAARIQEELSALRAEHQQDSEDLFKKIVRASQESEARIQQLKSEWQSMTQESFQESSVKELRRLEDQLAGLQQELAALALKQSSVAEEVGLLPQQIQAVRDDVESQFPAWISQFLARGGGGRVGLLQREEMQAQLRELESKILTHVAEMQGKSAREAAASLSLTLQKEGVIGVTEEQVHHIVKQALQRYSEDRIGLADYALESGGASVISTRCSETYETKTALLSLFGIPLWYHSQSPRVILQPDVHPGNCWAFQGPQGFAVVRLSARIRPTAVTLEHVPKALSPNSTISSAPKDFAIFGFDEDLQQEGTLLGKFTYDQDGEPIQTFHFQAPTMATYQVVELRILTNWGHPEYTCIYRFRVHGEPAH

SEQ ID NO: 5665 - protein, 178 aa, Homo sapiens
MHMMVSKPEQWVKPMAVAGANQYTFHLEATENPGALIKDIRENGMKSCSVTQAEVQWHSQGPLQVGLAIKPGTSVEYLAPWANQIDMALVMTVEPGFGGQKFMEDMMPKVHWLRTQFPSLDIEVDGGVGPDTVHKCAEAGANMIVSGSAIMRSEDPRSVINLLRNVCSEAAQKRSLDR

SEQ ID NO: 5666 - protein, 228 aa, Homo sapiens
MASGCKIGPSILNSDLANLGAECLRMLDSGADYLHLDVMDGHFVPNITFGHPVVESLRKQLGQDPFFDMHMMVSKPEQWVKPMAVAGANQYTFHLEATENPGALIKDIRENGMKVGLAIKPGTSVEYLAPWANQIDMALVMTVEPGFGGQKFMEDMMPKVHWLRTQFPSLDIEVDGGVGPDTVHKCAEAGANMIVSGSAIMRSEDPRSVINLLRNVCSEAAQKRSLDR

SEQ ID NO: 5667 - protein, 1190 aa, Homo sapiens
MTSRFGKTYSRKGGNGSSKFDEVFSNKRTTLSTKWGETTFMAKLGQKRPNFKPDIQEIPKKPKVEEESTGDPFGFDSDDESLPVSSKNLAQVKCSSYSESSEAAQLEEVTSVLEANSKISHVVVEDTVVSDKCFPLEDTLLGKEKSTNRIVEDDASISSCNKLITSDKVENFHEEHEKNSHHIHKNADDSTKKPNAETTVASEIKETNDTWNSQFGKRPESPSEISPIKGSVRTGLFEWDNDFEDIRSEDCILSLDSDPLLEMKDDDFKNRLENLNEAIEEDIVQSVLRPTNCRTYCRANKTKSSQGASNFDKLMDGTSQALAKANSESSKDGLNQAKKGGVSCGTSFRGTVGRTRDYTVLHPSCLSVCNVTIQDTMERSMDEFTASTPADLGEAGRLRKKADIATSKTTTRFRPSNTKSKKDVKLEFFGFEDHETGGDEGGSGSSNYKIKYFGFDDLSESEDDEDDDCQVERKTSKKRTKTAPSPSLQPPPESNDNSQDSQSGTNNAENLDFTEDLPGVPESVKKPINKQGDKSKENTRKIFSGPKRSPTKAVYNARHWNHPDSEELPGPPVVKPQSVTVRLSSKEPNQKDDGVFKAPAPPSKVIKTVTIPTQPYQDIVTALKCRREDKELYTVVQHVKHFNDVVEFGENQEFTDDIEYLLSGLKSTQPLNTRCLSVISLATKCAMPSFRMHLRAHGMVAMVFKTLDDSQHHQNLSLCTAALMYILSRDRLNMDLDRASLDLMIRLLELEQDASSAKLLNEKDMNKIKEKIRRLCETVHNKHLDLENITTGHLAMETLLSLTSKRAGDWFKEELRLLGGLDHIVDKVKECVDHLSRDEDEEKLVASLWGAERCLRVLESVTVHNPENQSYLIAYKDSQLIVSSAKALQHCEELIQQYNRAEDSICLADSKPLPHQNVTNHVGKAVEDCMRAIIGVLLNLTNDNEWGSTKTGEQDGLIGTALNCVLQVPKYLPQEQRFDIRVLGLGLLINLVEYSARNRHCLVNMETSCSFDSSICSGEGDDSLRIGGQVHAVQALVQLFLERERAAQLAESKTDELIKDAPTTQHDKSGEWQETSGEIQWVSTEKTDGTEEKHKKEEEDEELDLNKALQHAGKHMEDCIVASYTALLLGCLCQESPINVTTVREYLPEGDFSIMTEMLKKFLSFMNLTCAVGTTGQKSISRVIEYLEHC

SEQ ID NO: 5668 - protein, 164 aa, Homo sapiens
MAEPASVAAESLAGSRARAARTVLGQVVLPGEELLLPEQEDAEGPGGAVERPLSLNARACSRVRVVCGPGLRRCGDRLLVTKCGRLRHKEPGSGSGGGVYWVDSQQKRYVPVKGDHVIGIVTAKSGDIFKVDVGGSEPASLSYLSFEGATKRNRPNVQAISSRL

SEQ ID NO: 5669 - protein, 275 aa, Homo sapiens
MAEPASVAAESLAGSRARAARTVLGQVVLPGEELLLPEQEDAEGPGGAVERPLSLNARACSRVRVVCGPGLRRCGDRLLVTKCGRLRHKEPGSGSGGGVYWVDSQQKRYVPVKGDHVIGIVTAKSGDIFKVDVGGSEPASLSYLSFEGATKRNRPNVQVGDLIYGQFVVANKDMEPEMVCIDSCGRANGMGVIGQDGLLFKVTLGLIRKLLAPDCEIIQEVGKLYPLEIVFGMNGRIWVKAKTIQQTLILANILEACEHMTSDQRKQIFSRLAES

SEQ ID NO: 5670 - protein, 201 aa, Homo sapiens
MYTLLSGLYKYMFQKDEYCILILGLDNAGKTTFLEQSKTRFNKNYKGMSLSKITTTVGLNIGTVDVGKARLMFWDLGGQEELQSLWDKYYAECHGVIYVIDSTDEERLAESKQAFEKVVTSEALCGVPVLVLANKQDVETCLSIPDIKTAFSDCTSKIGRRDCLTQACSALTGKGVREGIEWMVKCVVRNVHRPPRQRDIT

SEQ ID NO: 5671 - protein, 663 aa, Homo sapiens
MSWLSSSQGVVLTAYHPSGKDQTVGNSHAKAGEEATSSRRYGQYTMNQESTTIKVMEKPPFDRSISQDSLDELSMEDYWIELENIKKSSENSQEDQEVVVVKEPDEGELEEEWLKEAGLSNLFGESAGDPQESIVFLSTLTRTQAAAVQKRVETVSQTLRKKNKQYQIPDVRDIFAQQRESKETAPGGTESQSLRTNENKYQGRDDEASNLVGEEKLIPPEETPAPETDINLEVSFAEQALNQKESSKEKIQKSKGDDATLPSFRLPKDKTGTTRIGDLAPQDMKKVCHLALIELTALYDVLGIELKQQKAVKIKTKDSGLFCVPLTALLEQDQRKVPGMRIPLIFQKLISRIEERGLETEGLLRIPGAAIRIKNLCQELEAKFYEGTFNWESVKQHDAASLLKLFIRELPQPLLSVEYLKAFQAVQNLPTKKQQLQALNLLVILLPDANRDTLKALLEFLQRVIDNKEKNKMTVMNVAMVMAPNLFMCHALGLKSSEQREFVMAAGTANTMHLLIKYQKLLWTIPKFIVNQVRKQNTENHKKDKRAMKKLLKKMAYDREKYEKQDKSTNDADVPQGVIRVQAPHLSKVSMAIQLTEELKASDVLARFLSQESGVAQTLKKGEVFLYEIGGNIGERCLDDDTYMKDLYQLNPNAEWVIKSKPL

SEQ ID NO: 5672 - protein, 134 aa, Homo sapiens
MPADLSGTWTLLSSDNFEGYMLALGIDFATRKIAKLLKPQKVIEQNGDSFTIHTNSSLRNYFVKFKVGEEFDEDNRGLDNRKCKSLVIWDNDRLTCIQKGEKKNRGWTHWIEGDKLHLEMFCEGQVCKQTFQRA

SEQ ID NO: 5673 - protein, 1360 aa, Homo sapiens
MSRQSTLYSFFPKSPALSDANKASARASREGGRAAAAPGASPSPGGDAAWSEAGPGPRPLARSASPPKAKNLNGGLRRSVAPAAPTSCDFSPGDLVWAKMEGYPWWPCLVYNHPFDGTFIREKGKSVRVHVQFFDDSPTRGWVSKRLLKPYTGSKSKEAQKGGHFYSAKPEILRAMQRADEALNKDKIKRLELAVCDEPSEPEEEEEMEVGTTYVTDKSEEDNEIESEEEVQPKTQGSRRSSRQIKKRRVISDSESDIGGSDVEFKPDTKEEGSSDEISSGVGDSESEGLNSPVKVARKRKRMVTGNGSLKRKSSRKETPSATKQATSISSETKNTLRAFSAPQNSESQAHVSGGGDDSSRPTVWYHETLEWLKEEKRRDEHRRRPDHPDFDASTLYVPEDFLNSCTPGMRKWWQIKSQNFDLVICYKVGKFYELYHMDALIGVSELGLVFMKGNWAHSGFPEIAFGRYSDSLVQKGYKVARVEQTETPEMMEARCRKMAHISKYDRVVRREICRIITKGTQTYSVLEGDPSENYSKYLLSLKEKEEDSSGHTRAYGVCFVDTSLGKFFIGQFSDDRHCSRFRTLVAHYPPVQVLFEKGNLSKETKTILKSSLSCSLQEGLIPGSQFWDASKTLRTLLEEEYFREKLSDGIGVMLPQVLKGMTSESDSIGLTPGEKSELALSALGGCVFYLKKCLIDQELLSMANFEEYIPLDSDTVSTTRSGAIFTKAYQRMVLDAVTLNNLEIFLNGTNGSTEGTLLERVDTCHTPFGKRLLKQWLCAPLCNHYAINDRLDAIEDLMVVPDKISEVVELLKKLPDLERLLSKIHNVGSPLKSQNHPDSRAIMYEETTYSKKKIIDFLSALEGFKVMCKIIGIMEEVADGFKSKILKQVISLQTKNPEGRFPDLTVELNRWDTAFDHEKARKTGLITPKAGFDSDYDQALADIRENEQSLLEYLEKQRNRIGCRTIVYWGIGRNRYQLEIPENFTTRNLPEEYELKSTKKGCKRYWTKTIEKKLANLINAEERRDVSLKDCMRRLFYNFDKNYKDWQSAVECIAVLDVLLCLANYSRGGDGPMCRPVILLPEDTPPFLELKGSRHPCITKTFFGDDFIPNDILIGCEEEEQENGKAYCVLVTGPNMGGKSTLMRQAGLLAVMAQMGCYVPAEVCRLTPIDRVFTRLGASDRIMSGESTFFVELSETASILMHATAHSLVLVDELGRGTATFDGTAIANAVVKELAETIKCRTLFSTHYHSLVEDYSQNVAVRLGHMACMVENECEDPSQETITFLYKFIKGACPKSYGFNAARLANLPEEVIQKGHRKAREFEKMNQSLRLFREVCLASERSTVDAEAVHKLLTLIKEL

SEQ ID NO: 5674 - protein, 96 aa, Homo sapiens
MTSALENYINRTVAVITSDGRMIVGTLKGFDQTINLILDESHERVFSSSQGVEQVVLGLYIVRGDNVAVIGEIDEETDSALDLGNIRAEPLNSVAH

SEQ ID NO: 5675 - protein, 201 aa, Homo sapiens
MCLLSSSAASDLAATSLTAHPCHPPLPRQPQPQLILSGSPSIGTVPPPAVGHTSLLPVNPPAISTTTSDLSAREDATPSASTGHLSVFPAFQVKIPAVPSEQTSQSFSEASHRVLPGGGPRCSRDFGAGVAGHLGLGIFGVGFGSPALLQSVVDENSCCLLYVVEDQLCDVEQAFRAEHLGQHQSGSGTGCRHCPQRPAAL

SEQ ID NO: 5676 - protein, 773 aa, Homo sapiens
METDESPSPLPCGPAGEAVMESRARPFQALPREQSPPPPLQTSSGAEVMDVGSGGDGQSELPAEDPFNFYGASLLSKGSFSKGRLLIDPNCSGHSPRTARHAPAVRKFSPDLKLLKDVKISVSFTESCRSKDRKVLYTGAERDVRAECGLLLSPVSGDVHACPFGGSVGDGVGIGGESADKKDEENELDQEKRVEYAVLDELEDFTDNLELDEEGAGGFTAKAIVQRDRVDEEALNFPYEDDFDNDVDALLEEGLCAPKKRRTEEKYGGDSDHPSDGETSVQPMMTKIKTVLKSRGRPPTEPLPDGWIMTFHNSGVPVYLHRESRVVTWSRPYFLGTGSIRKHDPPLSSIPCLHYKKMKDNEEREQSSDLTPSGDVSPVKPLSRSAELEFPLDEPDSMGADPGPPDEKDPLGAEAAPGALGQVKAKVEVCKDESVDLEEFRSYLEKRFDFEQVTVKKFRTWAERRQFNREMKRKQAESERPILPANQKLITLSVQDAPTKKEFVINPNGKSEVCILHEYMQRVLKVRPVYNFFECENPSEPFGASVTIDGVTYGSGTASSKKLAKNKAARATLEILIPDFVKQTSEEKPKDSEELEYFNHISIEDSRVYELTSKAGLLSPYQILHECLKRNHGMGDTSIKFEVVPGKNQKSEYVMACGKHTVRGWCKNKRVGKQLASQKILQLLHPHVKNWGSLLRMYGRESSKMVKQETSDKSVIELQQYAKKNKPNLHILSKLQEEMKRLAEEREETRKKPKMSIVASAQPGGEPLCTVDV

SEQ ID NO: 5677 - protein, 417 aa, Homo sapiens
MGRRRAPELYRAPFPLYALQVDPSTGLLIAAGGGGAAKTGIKNGVHFLQLELINGRLSASLLHSHDTETRATMNLALAGDILAAGQDAHCQLLRFQAHQQQGNKAEKAGSKEQGPRQRKGAAPAEKKCGAETQHEGLELRVENLQAVQTDFSSDPLQKVVCFNHDNTLLATGGTDGYVRVWKVPSLEKVLEFKAHEGEIEDLALGPDGKLVTVGRDLKASVWQKDQLVTQLHWQENGPTFSSTPYRYQACRFGQVPDQPAGLRLFTVQIPHKRLRQPPPCYLTAWDGSNFLPLRTKSCGHEVVSCLDVSESGTFLGLGTVTGSVAIYIAFSLQCLYYVREAHGIVVTDVAFLPEKGRGPELLGSHETALFSVAVDSRCQLHLLPSRRSVPVWLLLLLCVGLIIVTILLLQSAFPGFL

SEQ ID NO: 5678 - protein, 1165 aa, Homo sapiens
MEQDRTNHVEGNRLSPFLIPSPPICQTEPLATKLQNGSPLPERAHPEVNGDTKWHSFKSYYGIPCMKGSQNSRVSPDFTQESRGYSKCLQNGGIKRTVSEPSLSGLLQIKKLKQDQKANGERRNFGVSQERNPGESSQPNVSDLSDKKESVSSVAQENAVKDFTSFSTHNCSGPENPELQILNEQEGKSANYHDKNIVLLKNKAVLMPNGATVSASSMEHTHGELLEKTLSQYYPDCVSIAVQKTTSHINAINSQATNELSCEITHPSHTSGQINSAQTSNSELPPKPAAVVSEACDADDADNASKLAAMLNTCSFQKPEQLQQQKSVFEICPSPAENNIQGTTKLASGEEFCSGSSSNLQAPGGSSERYLKQNEMNGAYFKQSSVFTKDSFSATTTPPPPSQLLLSPPPPLPQVPQLPSEGKSTLNGGVLEEHHHYPNQSNTTLLREVKIEGKPEAPPSQSPNPSTHVCSPSPMLSERPQNNCVNRNDIQTAGTMTVPLCSEKTRPMSEHLKHNPPIFGSSGELQDNCQQLMRNKEQEILKGRDKEQTRDLVPPTQHYLKPGWIELKAPRFHQAESHLKRNEASLPSILQYQPNLSNQMTSKQYTGNSNMPGGLPRQAYTQKTTQLEHKSQMYQVEMNQGQSQGTVDQHLQFQKPSHQVHFSKTDHLPKAHVQSLCGTRFHFQQRADSQTEKLMSPVLKQQLNQQASETEPFSNSHLLQHKPHKQAAQTQPSQSSHLPQNQQQQQKLQIKNKEEILQTFPHPQSNNDQQREGSFFGQTKVEECFHGENQYSKSSEFETHNVQMGLEEVQNINRRNSPYSQTMKSSACKIQVSCSNNTHLVSENKEQTTHPELFAGNKTQNLHHMQYFPNNVIPKQDLLHRCFQEQEQKSQQASVLQGYKNRNQDMSGQQAAQLAQQRYLIHNHANVFPVPDQGGSHTQTPPQKDTQKHAALRWHLLQKQEQQQTQQPQTESCHSQMHRPIKVEPGCKPHACMHTAPPENKTWKKVTKQENPPASCDNVQQKSIIETMEQHLKQFHAKSLFDHKALTLKSQKQVKVEMSGPVTVLTRQTTAAELDSHTPALEQQTTSSEKTPTKRTAASVLNNFIESPSKLLDTPIKNLLDTPVKTQYDFPSCRCVGKCQKCTETHGVYPELANLSSDMGFSFFF

SEQ ID NO: 5679 - protein, 1462 aa, Homo sapiens
MGKTSFRIIFLPTEEGSIESSLFINTSSYGVLSYHVSGIGTRRISTEGSAKQLPNAYFLLPKVQSIQLSQMQAETTNTSLLQVQLECSLHNKVCQQLKGCYLESDDVLRLQMSIMVTMENFSKEFEENTQHLLDHLSIVYVATDESETSDDSAVNMYILHSGNSLIWIQDIRHFSQRDALSLQFEPVLLPTSTTNFTKIASFTCKAATSCDSGIIEDVKKTTHTPTLKACLFSSVAQGYFRMDSSATQFHIETHENTSGLWSIWYRNHFDRSVVLNDVFLSKETKHMLKILNFTGPLFLPPGCWNIFSLKLAVKDIAINLFTNVFLTTNIGAIFAIPLQIYSAPTKEGSLGFEVIAHCGMHYFMGKSKAGNPNWNGSLSLDQSTWNVDSELANKLYERWKKYKNGDVCKRNVLGTTRFAHLKKSKESESFVFFLPRLIAEPGLMLNFSATALRSRMIKYFVVQNPSSWPVSLQLLPLSLYPKPEALVHLLHRWFGTDMQMINFTTGEFQLTEACPYLGTHSEESRFGILHLHLQPLEMKRVGVVFTPADYGKVTSLILIRNNLTVIDMIGVEGFGARELLKVGGRLPGAGGSLRFKVPESTLMDCRRQLKDSKQILSITKNFKVENIGPLPITVSSLKINGYNCQGYGFEVLDCHQFSLDPNTSRDISIVFTPDFTSSWVIRDLSLVTAADLEFRFTLNVTLPHHLLPLCADVVPGPSWEESFWRLTVFFVSLSLLGVILIAFQQAQYILMEFMKTRQRQNASSSSQQNNGPMDVISPHSYKSNCKNFLDTYGPSDKGRGKNCLPVNTPQSRIQNAAKRSPATYGHSQKKHKCSVYYSKHKTSTAAASSTSTTTEEKQTSPLGSSLPAAKEDICTDAMRENWISLRYASGINVNLQKNLTLPKNLLNKEENTLKNTIVFSNPSSECSMKEGIQTCMFPKETDIKTSENTAEFKERELCPLKTSKKLPENHLPRNSPQYHQPDLPEISRKNNGNNQQVPVKNEVDHCENLKKVDTKPSSEKKIHKTSREDMFSEKQDIPFVEQEDPYRKKKLQEKREGNLQNLNWSKSRTCRKNKKRGVAPVSRPPEQSDLKLVCSDFERSELSSDINVRSWCIQESTREVCKADAEIASSLPAAQREAEGYYQKPEKKCVDKFCSDSSSDCGSSSGSVRASRGSWGSWSSTSSSDGDKKPMVDAQHFLPAGDSVSQNDFPSEAPISLNLSHNICNPMTVNSLPQYAEPSCPSLPAGPTGVEEDKGLYSPGDLWPTPPVCVTSSLNCTLENGVPCVIQESAPVHNSFIDWSATCEGQFSSAYCPLELNDYNAFPEENMNYANGFPCPADVQTDFIDHNSQSTWNTPPNMPAAWGHASFISSPPYLTSTRSLSPMSGLFGSIWAPQSDVYENCCPINPTTEHSTHMENQAVVCKEYYPGFNPFRAYMNLDIWTTTANRNANFPLSRDSSYCGNV

SEQ ID NO: 5680 - protein, 610 aa, Homo sapiens
METAPKPGKDVPPKKDKLQTKRKKPRRYWEEETVPTTAGASPGPPRNKKNRELRPQRPKNAYILKKSRISKKPQVPKKPREWKNPESQRGLSGAQDPFPGPAPVPVEVVQKFCRIDKSRKLPHSKAKTRSRLEVAEAEEEETSIKAARSELLLAEEPGFLEGEDGEDTAKICQADIVEAVDIASAAKHFDLNLRQFGPYRLNYSRTGRHLAFGGRRGHVAALDWVTKKLMCEINVMEAVRDIRFLHSEALLAVAQNRWLHIYDNQGIELHCIRRCDRVTRLEFLPFHFLLATASETGFLTYLDVSVGKIVAALNARAGRLDVMSQNPYNAVIHLGHSNGTVSLWSPAMKEPLAKILCHRGGVRAVAVDSTGTYMATSGLDHQLKIFDLRGTYQPLSTRTLPHGAGHLAFSQRGLLVAGMGDVVNIWAGQGKASPPSLEQPYLTHRLSGPVHGLQFCPFEDVLGVGHTGGITSMLVPGAGEPNFDGLESNPYRSRKQRQEWEVKALLEKVPAELICLDPRALAEVDVISLEQGKKEQIERLGYDPQAKAPFQPKPKQKGRSSTASLVKRKRKVMDEEHRDKVRQSLQQQHHKEAKAKPTGARPSALDRFVR

SEQ ID NO: 5681 - protein, 176 aa, Homo sapiens
MGGYLKTRPWTLQHFYLCLMPAATWLVLLLLLWLSLGVKTAAPNPRTFAVLGRITAARGEVATVMNSAMWHQTATQTTVSSATPVTHIQARFHLQQSWMRWLAEANPLPALQAKAGMWPRWFLRSLTILRSCILSISGQRCLHAPSSFVSLMFLATCYSSLSYFSRFHRERFSCPW

SEQ ID NO: 5682 - protein, 139 aa, Homo sapiens
MPVMPIPRRVRSFHGPHTTCLHAACGPVRASHLARTKYNNFDVYIKTRWLYGFIRFLLYFSCSLFTAALWGALAALFCLQYLGVRVLLRFQRKLSVLLLLLGRRRVDFRLVNELLVYGIHVTMLLVGGLGWCFMVFVDM

SEQ ID NO: 5683 - protein, 139 aa, Homo sapiens; identical to SEQ ID NO: 5682

SEQ ID NO: 5684 - protein, 139 aa, Homo sapiens; identical to SEQ ID NO: 5682

SEQ ID NO: 5685 - protein, 139 aa, Homo sapiens; identical to SEQ ID NO: 5682

SEQ ID NO: 5686 - protein, 139 aa, Homo sapiens; identical to SEQ ID NO: 5682

SEQ ID NO: 5687 - protein, 139 aa, Homo sapiens; identical to SEQ ID NO: 5682

SEQ ID NO: 5688 - protein, 139 aa, Homo sapiens; identical to SEQ ID NO: 5682

SEQ ID NO: 5689 - protein, 139 aa, Homo sapiens; identical to SEQ ID NO: 5682

SEQ ID NO: 5690 - protein, 139 aa, Homo sapiens; identical to SEQ ID NO: 5682

SEQ ID NO: 5691 - protein, 139 aa, Homo sapiens; identical to SEQ ID NO: 5682

SEQ ID NO: 5692 - protein, 139 aa, Homo sapiens; identical to SEQ ID NO: 5682

SEQ ID NO: 5693 - protein, 139 aa, Homo sapiens; identical to SEQ ID NO: 5682

SEQ ID NO: 5694 - protein, 95 aa, Homo sapiens
MLGARVAAHLDALGPLVPYVPPPLLPSMFYVGLFFVNVLILYYAFLMEYIVLNVGLVFLPEDMDQALVDLGVLSDPGSGLYDADSELDVFDAYLE

SEQ ID NO: 5695 - protein, 292 aa, Homo sapiens
MPLHVKWPFPAVPPLTWTLASSVVMGLVGTYSCFWTKYMNHLTVHNREVLYELIEKRGPATPLITVSNHQSCMDDPHLWGILKLRHIWNLKLMRWTPAAADICFTKELHSHFFSLGKCVPVCRGAEFFQAENEGKGVLDTGRHMPGAGKRREKGDGVYQKGMDFILEKLNHGDWVHIFPEGKVNMSSEFLRFKWGIGRLIAECHLNPIILPLWHVGMNDVLPNSPPYFPRFGQKITVLIGKPFSALPVLERLRAENKSAVEMRKALTDFIQEEFQHLKTQAEQLHNHLQPGR

SEQ ID NO: 5696 - protein, 262 aa, Homo sapiens
MPLHVKWPFPAVPPLTWTLASSVVMGLVGTYSCFWTKYMNHLTVHNREVLYELIEKRGPATPLITVSNHQSCMDDPHLWGILKLRHIWNLKLMRWTPAAADICFTKELHSHFFSLGKCVPVCRGDGVYQKGMDFILEKLNHGDWVHIFPEGKVNMSSEFLRFKWGIGRLIAECHLNPIILPLWHVGMNDVLPNSPPYFPRFGQKITVLIGKPFSALPVLERLRAENKSAVEMRKALTDFIQEEFQHLKTQAEQLHNHLQPGR

SEQ ID NO: 5697 - protein, 278 aa, Homo sapiens
MPLHVKWPFPAVPPLTWTLASSVVMGLVGTYSCFWTKYMNHLTVHNREVLYELIEKRGPATPLITVSNHQSCMDDPHLWGILKLRHIWNLKLMRWTPAAADICFTKELHSHFFSLGKCVPVCRGAEFFQAENEGKGVLDTGRHMPGAGKRREKGDGVYQKGMDFILEKLNHGDWVHIFPEGIGRLIAECHLNPIILPLWHVGMNDVLPNSPPYFPRFGQKITVLIGKPFSALPVLERLRAENKSAVEMRKALTDFIQEEFQHLKTQAEQLHNHLQPGR

SEQ ID NO: 5698 - protein, 248 aa, Homo sapiens
MPLHVKWPFPAVPPLTWTLASSVVMGLVGTYSCFWTKYMNHLTVHNREVLYELIEKRGPATPLITVSNHQSCMDDPHLWGILKLRHIWNLKLMRWTPAAADICFTKELHSHFFSLGKCVPVCRGDGVYQKGMDFILEKLNHGDWVHIFPEGIGRLIAECHLNPIILPLWHVGMNDVLPNSPPYFPRFGQKITVLIGKPFSALPVLERLRAENKSAVEMRKALTDFIQEEFQHLKTQAEQLHNHLQPGR

SEQ ID NO: 5699 - protein, 95 aa, Homo sapiens
MPLHVKWPFPAVPPLTWTLASSVVMGLVGTYSCFWTKYMNHLTVHNREVLYELIEKRGPATPLITVSNHQSCMDDPHLWGILKLRHIWNLKLMRW

SEQ ID NO: 5700 - protein, 95 aa, Homo sapiens
MANEKPTEEVKTENNNHINLKVAGQDGSVVQFKIKRQTPLSKLMKAYCEPRGLSVKQIRFRFGGQPISGTDKPAQLEMEDEDTIDVFQQPTGGVY

SEQ ID NO: 5701 - protein, 160 aa, Homo sapiens
MLPFLFFSTLFSSIFTEAQKQYWVCNSSDASISYTYCDKMQYPISINVNPCIELKGSKGLLHIFYIPRRDLKQLYFNLYITVNTMNLPKRKEVICRGSDDDYSFCRALKGETVNTTISFSFKGIKFSKGKYKCVVEAISGSPEEMLFCLEFVILHQPNSN

SEQ ID NO: 5702 - protein, 2799 aa, Homo sapiens
MTSIHFVVHPLPGTEDQLNDRLREVSEKLNKYNLNSHPPLNVLEQATIKQCVVGPNHAAFLLEDGRVCRIGFSVQPDRLELGKPDNNDGSKLNSNSGAGRTSRPGRTSDSPWFLSGSETLGRLAGNTLGSRWSSGVGGSGGGSSGRSSAGARDSRRQTRVIRTGRDRGSGLLGSQPQPVIPASVIPEELISQAQVVLQGKSRSVIIRELQRTNLDVNLAVNNLLSRDDEDGDDGDDTASESYLPGEDLMSLLDADIHSAHPSVIIDADAMFSEDISYFGYPSFRRSSLSRLGSSRVLLLPLERDSELLRERESVLRLRERRWLDGASFDNERGSTSKEGEPNLDKKNTPVQSPVSLGEDLQWWPDKDGTKFICIGALYSELLAVSSKGELYQWKWSESEPYRNAQNPSLHHPRATFLGLTNEKIVLLSANSIRATVATENNKVATWVDETLSSVASKLEHTAQTYSELQGERIVSLHCCALYTCAQLENSLYWWGVVPFSQRKKMLEKARAKNKKPKSSAGISSMPNITVGTQVCLRNNPLYHAGAVAFSISAGIPKVGVLMESVWNMNDSCRFQLRSPESLKNMEKASKTTEAKPESKQEPVKTEMGPPPSPASTCSDASSIASSASMPYKRRRSTPAPKEEEKVNEEQWSLREVVFVEDVKNVPVGKVLKVDGAYVAVKFPGTSSNTNCQNSSGPDADPSSLLQDCRLLRIDELQVVKTGGTPKVPDCFQRTPKKLCIPEKTEILAVNVDSKGVHAVLKTGNWVRYCIFDLATGKAEQENNFPTSSIAFLGQNERNVAIFTAGQESPIILRDGNGTIYPMAKDCMGGIRDPDWLDLPPISSLGMGVHSLINLPANSTIKKKAAVIIMAVEKQTLMQHILRCDYEACRQYLMNLEQAVVLEQNLQMLQTFISHRCDGNRNILHACVSVCFPTSNKETKEEEEAERSERNTFAERLSAVEAIANAISVVSSNGPGNRAGSSSSRSLRLREMMRRSLRAAGLGRHEAGASSSDHQDPVSPPIAPPSWVPDPPAMDPDGDIDFILAPAVGSLTTAATGTGQGPSTSTIPGPSTEPSVVESKDRKANAHFILKLLCDSVVLQPYLRELLSAKDARGMTPFMSAVSGRAYPAAITILETAQKIAKAEISSSEKEEDVFMGMVCPSGTNPDDSPLYVLCCNDTCSFTWTGAEHINQDIFECRTCGLLESLCCCTECARVCHKGHDCKLKRTSPTAYCDCWEKCKCKTLIAGQKSARLDLLYRLLTATNLVTLPNSRGEHLLLFLVQTVARQTVEHCQYRPPRIREDRNRKTASPEDSDMPDHDLEPPRFAQLALERVLQDWNALKSMIMFGSQENKDPLSASSRIGHLLPEEQVYLNQQSGTIRLDCFTHCLIVKCTADILLLDTLLGTLVKELQNKYTPGRREEAIAVTMRFLRSVARVFVILSVEMASSKKKNNFIPQPIGKCKRVFQALLPYAVEELCNVAESLIVPVRMGIARPTAPFTLASTSIDAMQGSEELFSVEPLPPRPSSDQSSSSSQSQSSYIIRNPQQRRISQSQPVRGRDEEQDDIVSADVEEVEVVEGVAGEEDHHDEQEEHGEENAEAEGQHDEHDEDGSDMELDLLAAAETESDSESNHSNQDNASGRRSVVTAATAGSEAGASSVPAFFSEDDSQSNDSSDSDSSSSQSDDIEQETFMLDEPLERTTNSSHANGAAQAPRSMQWAVRNTQHQRAASTAPSSTSTPAASSAGLIYIDPSNLRRSGTISTSAAAAAAALEASNASSYLTSASSLARAYSIVIRQISDLMGLIPKYNHLVYSQIPAAVKLTYQDAVNLQNYVEEKLIPTWNWMVSIMDSTEAQLRYGSALASAGDPGHPNHPLHASQNSARRERMTAREEASLRTLEGRRRATLLSARQGMMSARGDFLNYALSLMRSHNDEHSDVLPVLDVCSLKHVAYVFQALIYWIKAMNQQTTLDTPQLERKRTRELLELGIDNEDSEHENDDDTNQSATLNDKDDDSLPAETGQNHPFFRRSDSMTFLGCIPPNPFEVPLAEAIPLADQPHLLQPNARKEDLFGRPSQGLYSSSASSGKCLMEVTVDRNCLEVLPTKMSYAANLKNVMNMQNRQKKEGEEQPVLPEETESSKPGPSAHDLAAQLKSSLLAEIGLTESEGPPLTSFRPQCSFMGMVISHDMLLGRWRLSLELFGRVFMEDVGAEPGSILTELGGFEVKESKFRREMEKLRNQQSRDLSLEVDRDRDLLIQQTMRQLNNHFGRRCATTPMAVHRVKVTFKDEPGEGSGVARSFYTAIAQAFLSNEKLPNLECIQNANKGTHTSLMQRLRNRGERDREREREREMRRSSGLRAGSRRDRDRDFRRQLSIDTRPFRPASEGNPSDDPEPLPAHRQALGERLYPRVQAMQPAFASKITGMLLELSPAQLLLLLASEDSLRARVDEAMELIIAHGRENGADSILDLGLVDSSEKVQQENRKRHGSSRSVVDMDLDDTDDGDDNAPLFYQPGKRGFYTPRPGKNTEARLNCFRNIGRILGLCLLQNELCPITLNRHVIKVLLGRKVNWHDFAFFDPVMYESLRQLILASQSSDADAVFSAMDLAFAIDLCKEEGGGQVELIPNGVNIPVTPQNVYEYVRKYAEHRMLVVAEQPLHAMRKGLLDVLPKNSLEDLTAEDFRLLVNGCGEVNVQMLISFTSFNDESGENAEKLLQFKRWFWSIVEKMSMTERQDLVYFWTSSPSLPASEEGFQPMPSITIRPPDDQHLPTANTCISRLYVPLYSSKQILKQKLLLAIKTKNFGFV

SEQ ID NO: 5703 - protein, 422 aa, Homo sapiens
MSSSCSGLSRVLVAVATALVSASSPCPQAWGPPGVQYGQPGRSVKLCCPGVTAGDPVSWFRDGEPKLLQGPDSGLGHELVLAQADSTDEGTYICQTLDGALGGTVTLQLGYPPARPVVSCQAADYENFSCTWSPSQISGLPTRYLTSYRKKTVLGADSQRRSPSTGPWPCPQDPLGAARCVVHGAEFWSQYRINVTEVNPLGASTRLLDVSLQSILRPDPPQGLRVESVPGYPRRLRASWTYPASWPCQPHFLLKFRLQYRPAQHPAWSTVEPAGLEEVITDAVAGLPHAVRVSARDFLDAGTWSTWSPEAWGTPSTGTIPKEIPAWGQLHTQPEVEPQVDSPAPPRPSLQPHPRLLDHRDSVEQVAVLASLGILSFLGLVAGALALGLWLRLRRGGKDGSPKPGFLASVIPVDRRPGAPNL

SEQ ID NO: 5704 - protein, 390 aa, Homo sapiens
MSSSCSGLSRVLVAVATALVSASSPCPQAWGPPGVQYGQPGRSVKLCCPGVTAGDPVSWFRDGEPKLLQGPDSGLGHELVLAQADSTDEGTYICQTLDGALGGTVTLQLGYPPARPVVSCQAADYENFSCTWSPSQISGLPTRYLTSYRKKTVLGADSQRRSPSTGPWPCPQDPLGAARCVVHGAEFWSQYRINVTEVNPLGASTRLLDVSLQSILRPDPPQGLRVESVPGYPRRLRASWTYPASWPCQPHFLLKFRLQYRPAQHPAWSTVEPAGLEEVITDAVAGLPHAVRVSARDFLDAGTWSTWSPEAWGTPSTGTIPKEIPAWGQLHTQPEVEPQVDSPAPPRPSLQPHPRLLDHRDSVEQVAVLASLGILSFLGLVAGALALGLW

SEQ ID NO: 5705 - protein, 183 aa, Homo sapiens
MASNKTTLQKMGKKQNGKSKKVEEAEPEEFVVEKVLDRRVVNGKVEYFLKWKGFTDADNTWEPEENLDCPELIEAFLNSQKAGKEKDGTKRKSLSDSESDDSKSKKKRDAADKPRGFARGLDPERIIGATDSSGELMFLMKWKDSDEADLVLAKEANMKCPQIVIAFYEERLTWHSCPEDEAQ

SEQ ID NO: 5706 - protein, 183 aa, Homo sapiens; identical to SEQ ID NO: 5705

SEQ ID NO: 5707 - protein, 223 aa, Homo sapiens
MMLAGYFAGLCGYFIVSLQSVYSSLQMLQLAGGPLYTLVASVFPVLGGISSECYETAKMAACPFPWKLHPRAVLSCCQHEHTVCRGWLETPVGTSHLVRRNGIRDPLKEAVGLFLIEQLCCVGDPISPLLVWALRGPQAELAEVPNSQVGGPPSPLGTLSQGKIRSLLATEHGRGWLDTPAGMIYPSRKSGSGSHLKKPSGHASIEQPCCAGKLLLPLLAWTL

SEQ ID NO: 5708 - protein, 1953 aa, Homo sapiens
MGVKKKKEMQVAALTICHQDLETLKSFADVEGKNLASLLLHCVQLTDGVSQIHYIKQIVPLLEKADKNGMCDPTIQSCLDILAGIYLSLSLKNPLKKVLASSLNSLPDFFLPEAMHRFTSRLQEELNTTDLYSYRKVTDNISSCMENFNLGRASVNNLLKNVLHFLQKSLIEILEENRKCAGNHIIQTQLMNDLLVGIRVSMMLVQKVQDFQGNLWKTSDSPIWQNMCGLLSIFTKVLSDDDLLQTVQSTSGLAIILFIKTMFHPSEKIPHLISSVLLRSVDCTSVPEWFMSSCRSLCCGDISQSAVLFLCQGTLAMLDWQNGSMGRSGEALLLDTAHVLFTLSSQIKEPTLEMFLSRILASWTNSAIQVLESSSPSLTDSLNGNSSIVGRLLEYVYTHWEHPLDALRHQTKIMFKNLLQMHRLTVEGADFVPDPFFVELTESLLRLEWHIKGKYTCLGCLVECIGVEHILAIDKTIPSQILEVMGDQSLVPYASDLLETMFRNHKSHLKSQTAESSWIDQWHETWVSPLLFILCEGNLDQKSYVIDYYLPKLLSYSPESLQYMVKILQTSIDAKTGQEQSFPSLGSCNSRGALGALMACLRIARAHGHLQSATDTWENLVSDARIKQGLIHQHCQVRIDTLGLLCESNRSTEIVSMEEMQWIQFFITYNLNSQSPGVRQQICSLLKKLFCRIQESSQVLYKLEQSKSKREPENELTKQHPSVSLQQYKNFMSSICNSLFEALFPGSSYSTRFSALTILGSIAEVFHVPEGRIYTVYQLSHDIDVGRFQTLMECFTSTFEDVKILAFDLLMKLSKTAVHFQDSGKLQGLFQAALELSTSTKPYDCVTASYLLNFLIWQDALPSSLSAYLTQQVACDNGDRPAAVVERNTLMVIKCLMENLEEEVSQAENSLLQAAAAFPMYGRVHCITGALQKLSLNSLQLVSEWRPVVEKLLLMSYRLSTVVSPVIQSSSPEGLIPMDTDSESASRLQMILNEIQPRDTNDYFNQAKILKEHDSFDMKDLNASVVNIDTSTEIKGKEVKTCDVTAQMVLVCCWRSMKEVALLLGMLCQLLPMQPVPESSDGLLTVEQVKEIGDYFKQHLLQSRHRGAFELAYTGFVKLTEVLNRCPNVSLQKLPEQWLWSVLEEIKCSDPSSKLCATRRSAGIPFYIQALLASEPKKGRMDLLKITMKELISLAGPTDDIQSTVPQVHALNILRALFRDTRLGENIIPYVADGAKAAILGFTSPVWAVRNSSTLLFSALITRIFGVKRAKDEHSKTNRMTGREFFSRFPELYPFLLKQLETVANTVDSDMGEPNRHPSMFLLLLVLERLYASPMDGTSSALSMGPFVPFIMRCGHSPVYHSREMAARALVPFVMIDHIPNTIRTLLSTLPSCTDQCFRQNHIHGTLLQVFHLLQAYSDSKHGTNSDFQHELTDITVCTKAKLWLAKRQNPCLVTRAVYIDILFLLTCCLNRSAKDNQPVLESLGFWEEVRGIISGSELITGFPWAFKVPGLPQYLQSLTRLAIAAVWAAAAKSGERETNVPISFSQLLESAFPEVRSLTLEALLEKFLAAASGLGEKGVPPLLCNMGEKFLLLAMKENHPECFCKILKILHCMDPGEWLPQTEHCVHLTPKEFLIWTMDIASNERSEIQSVALRLASKVISHHMQTCVENRELIAAELKQWVQLVILSCEDHLPTESRLAVVEVLTSTTPLFLTNPHPILELQDTLALWKCVLTLLQSEEQAVRDAATETVTTAMSQENTCQSTEFAFCQVDASIALALALAVLCDLLQQWDQLAPGLPILLGWLLGESDDLVACVESMHQVEEDYLFEKAEVNFWAETLIFVKYLCKHLFCLLSKSGWRPPSPEMLCHLQRMVSEQCHLLSQFFRELPPAAEFVKTVEFTRLRIQEERTLACLRLLAFLEGKEGEDTLVLSVWDSYAESRQLTLPRTEAAC

SEQ ID NO: 5709 - protein, 958 aa, Homo sapiens
MSSCRSLCCGDISQSAVLFLCQGTLAMLDWQNGSMGRSGEALLLDTAHVLFTLSSQIKEPTLEMFLSRILASWTNSAIQVLESSSPSLTDSLNGNSSIVGRLLEYVYTHWEHPLDALRHQTKIMFKNLLQMHRLTVEGADFVPDPFFVELTESLLRLEWHIKGKYTCLGCLVECIGVEHILAIDKTIPSQILEVMGDQSLVPYASDLLETMFRNHKSHLKSQTAESSWIDQWHETWVSPLLFILCEGNLDQKSYVIDYYLPKLLSYSPESLQYMVKILQTSIDAKTGQEQSFPSLGSCNSRGALGALMACLRIARAHGHLQSATDTWENLVSDARIKQGLIHQHCQVRIDTLGLLCESNRSTEIVSMEEMQWIQFFITYNLNSQSPGVRQQICSLLKKLFCRIQESSQVLYKLEQSKSKREPENELTKQHPSVSLQQYKNFMSSICNSLFEALFPGSSYSTRFSALTILGSIAEVFHVPEGRIYTVYQLSHDIDVGRFQTLMECFTSTFEDVKILAFDLLMKLSKTAVHFQDSGKLQGLFQAALELSTSTKPYDCVTASYLLNFLIWQDALPSSLSAYLTQQVACDNGDRPAAVVERNTLMVIKCLMENLEEEVSQAENSLLQAAAAFPMYGRVHCITGALQKLSLNSLQLVSEWRPVVEKLLLMSYRLSTVVSPVIQSSSPEGLIPMDTDSESASRLQMILNEIQPRDTNDYFNQAKILKEHDSFDMKDLNASVVNIDTSTEIKGKEVKTCDVTAQMVLVCCWRSMKEVALLLGMLCQLLPMQPVPESSDGLLTVEQVKEIGDYFKQHLLQSRHRGAFELAYTGFVKLTEVLNRCPNVSLQKLPEQWLWSVLEEIKCSDPSSKLCATRRSAGIPFYIQALLASEPKKGRMDLLKITMKELISLAGPTDDIQSTVPQVHALNILRALFRDTRLGENIIPYVADGAKAAILGFTSPVWA

SEQ ID NO: 5710 - protein, 525 aa, Homo sapiens
MLLPLLLLLPMCWAVEVKRPRGVSLTNHHFYDESKPFTCLDGSATIPFDQVNDDYCDCKDGSDEPGTAACPNGSFHCTNTGYKPLYIPSNRVNDGVCDCCDGTDEYNSGVICENTCKEKGRKERESLQQMAEVTREGFRLKKILIEDWKKAREEKQKKLIELQAGKKSLEDQVEMLRTVKEEAEKPEREAKEQHQKLWEEQLAAAKAQQEQELAADAFKELDDDMDGTVSVTELQTHPELDTDGDGALSEAEAQALLSGDTQTDATSFYDRVWAAIRDKYRSEALPTDLPAPSAPDLTEPKEEQPPVPSSPTEEEEEEEEEEEEEAEEEEEEEDSEVQGEQPKPASPAEEDKMPPYDEQTQAFIDAAQEARNKFEEAERSLKDMEESIRNLEQEISFDFGPNGEFAYLYSQCYELTTNEYVYRLCPFKLVSQKPKLGGSPTSLGTWGSWIGPDHDKFSAMKYEQGTGCWQGPNRSTTVRLLCGKETMVTSTTEPSRCEYLMELMTPAACPEPPPEAPTEDDHDEL

SEQ ID NO: 5711 - protein, 528 aa, Homo sapiens
MLLPLLLLLPMCWAVEVKRPRGVSLTNHHFYDESKPFTCLDGSATIPFDQVNDDYCDCKDGSDEPGTAACPNGSFHCTNTGYKPLYIPSNRVNDGVCDCCDGTDEYNSGVICENTCKEKGRKERESLQQMAEVTREGFRLKKILIEDWKKAREEKQKKLIELQAGKKSLEDQVEMLRTVKEEAEKPEREAKEQHQKLWEEQLAAAKAQQEQELAADAFKELDDDMDGTVSVTELQTHPELDTDGDGALSEAEAQALLSGDTQTDATSFYDRVWAAIRDKYRSEALPTDLPAPSAPDLTEPKEEQPPVPSSPTEEEEEEEEEEEEEAEEEEEEEDSEEAPPPLSPPQPASPAEEDKMPPYDEQTQAFIDAAQEARNKFEEAERSLKDMEESIRNLEQEISFDFGPNGEFAYLYSQCYELTTNEYVYRLCPFKLVSQKPKLGGSPTSLGTWGSWIGPDHDKFSAMKYEQGTGCWQGPNRSTTVRLLCGKETMVTSTTEPSRCEYLMELMTPAACPEPPPEAPTEDDHDEL

SEQ ID NO: 5712 - protein, 1163 aa, Homo sapiens
MTRTRAALLLFTALATSLGFNLDTEELTAFRVDSAGFGDSVVQYANSWVVVGAPQKITAANQTGGLYQCGYSTGACEPIGLQVPPEAVNMSLGLSLASTTSPSQLLACGPTVHHECGRNMYLTGLCFLLGPTQLTQRLPVSRQECPRQEQDIVFLIDGSGSISSRNFATMMNFVRAVISQFQRPSTQFSLMQFSNKFQTHFTFEEFRRSSNPLSLLASVHQLQGFTYTATAIQNVVHRLFHASYGARRDAAKILIVITDGKKEGDSLDYKDVIPMADAAGIIRYAIGVGLAFQNRNSWKELNDIASKPSQEHIFKVEDFDALKDIQNQLKEKIFAIEGTETTSSSSFELEMAQEGFSAVFTPDGPVLGAVGSFTWSGGAFLYPPNMSPTFINMSQENVDMRDSYLGYSTELALWKGVQSLVLGAPRYQHTGKAVIFTQVSRQWRMKAEVTGTQIGSYFGASLCSVDVDSDGSTDLVLIGAPHYYEQTRGGQVSVCPLPRGWRRWWCDAVLYGEQGHPWGRFGAALTVLGDVNGDKLTDVVIGAPGEEENRGAVYLFHGVLGPSISPSHSQRIAGSQLSSRLQYFGQALSGGQDLTQDGLVDLAVGARGQVLLLRTRPVLWVGVSMQFIPAEIPRSAFECREQVVSEQTLVQSNICLYIDKRSKNLLGSRDLQSSVTLDLALDPGRLSPRATFQETKNRSLSRVRVLGLKAHCENFNLLLPSCVEDSVTPITLRLNFTLVGKPLLAFRNLRPMLAADAQRYFTASLPFEKNCGADHICQDNLGISFSFPGLKSLLVGSNLELNAEVMVWNDGEDSYGTTITFSHPAGLSYRYVAEGQKQGQLRSLHLTCDSAPVGSQGTWSTSCRINHLIFRGGAQITFLATFDVSPKAVLGDRLLLTANVSSENNTPRTSKTTFQLELPVKYAVYTVVSSHEQFTKYLNFSESEEKESHVAMHRYQVNNLGQRDLPVSINFWVPVELNQEAVWMDVEVSHPQNPSLRCSSEKIAPPASDFLAHIQKNPVLDCSIAGCLRFRCDVPSFSVQEELDFTLKGNLSFGWVRQILQKKVSVVSVAEITFDTSVYSQLPGQEAFMRAQTTTVLEKYKVHNPTPLIVGSSIGGLLLLALITAVLYKVGFFKRQYKEMMEEANGQIAPENGTQTPSPPSEK

SEQ ID NO: 5713 - protein, 142 aa, Homo sapiens
MFACAKLACTPSLIRAGSRVAYRPISASVLSRPEASRTGEGSTVFNGAQNGVSQLIQREFQTSAISRDIDTAAKFIGAGAATVGVAGSGAGIGTVFGSLIIGYARNPSLKQQLFSYAILGFALSEAMGLFCLMVAFLILFAM

SEQ ID NO: 5714 - protein, 142 aa, Homo sapiens; identical to SEQ ID NO: 5713

SEQ ID NO: 5715 - protein, 133 aa, Homo sapiens
MNYMPGTASLIEDIDKKHLVLLRDGRTLIGFLRSIDQFANLVLHQTVERIHVGKKYGDIPRGIFVVRGENVVLLGEIDLEKESDTPLQQVSIEEILEEQRVEQQTKLEAEKLKVQALKDRGLSIPRADTLDEY

SEQ ID NO: 5716 - protein, 875 aa, Homo sapiens
MGKTANSPGSGARPDPVRSFNRWKKKHSHRQNKKKQLRKQLKKPEWQVERESISRLMQNYEKINVNEITRFSDFPLSKKTLKGLQEAQYRLVTEIQKQTIGLALQGKDVLGAAKTGSGKTLAFLVPVLEALYRLQWTSTDGLGVLIISPTRELAYQTFEVLRKVGKNHDFSAGLIIGGKDLKHEAERINNINILVCTPGRLLQHMDETVSFHATDLQMLVLDEADRILDMGFADTMNAVIENLPKKRQTLLFSATQTKSVKDLARLSLKNPEYVWVHEKAKYSTPATLEQNYIVCELQQKISVLYSFLRSHLKKKSIVFFSSCKEVQYLYRVFCRLRPGVSILALHGRQQQMRRMEVYNEFVRKRAAVLFATDIAARGLDFPAVNWVLQFDCPEDANTYIHRAGRTARYKEDGEALLILLPSEKAMVQQLLQKKVPVKEIKINPEKLIDVQKKLESILAQDQDLKERAQRCFVSYVRSVYLMKDKEVFDVSKLPIPEYALSLGLAVAPRVRFLQKMQKQPTKELVRSQADKVIEPRAPSLTNDEVEEFRAYFNEKMSILQKGGKRLEGTEHRQDNDTGNEEQEEEEDDEEEMEEKLAKAKGSQAPSLPNTSEAQKIKEVPTQFLDRDEEEEDADFLKVKRHNVFGLDLKDEKTLQKKEPSKSSIKKKMTKVAEAKKVMKRNFKVNKKITFTDEGELVQQWPQMQKSAIKDAEEDDDTGGINLHKAKERLQEEDKFDKEEYRKKIKAKHREKRLKEREARREANKRQAKAKDEEEAFLDWSDDDDDDDDGFDPSTLPDPDKYRSSEDSDSEDMENKISDTKKKQGMKKRSNSEVEDVGPTSHNRKKARWDTLEPLDTGLSLAEDEELVLHLLRSQS

SEQ ID NO: 5717 - protein, 150 aa, Homo sapiens
MSKISQQNSTPGVNGISVIHTQAHASGLQQVPQLVPAGPGGGGKAVAPSKQSKKSSPMDRNSDEYRQRRERNNMAVKKSRLKSKQKAQDTLQRVNQLKEENERLEAKIKLLTKELSVLKDLFLEHAHNLADNVQSISTENTTADGDNAGQ

SEQ ID NO: 5718 - protein, 412 aa, Homo sapiens
MELSAVGERVFAAESIIKRRIRKGRIEYLVKWKGWAIKYSTWEPEENILDSRLIAAFEQKERERELYGPKKRGPKPKTFLLKARAQAEALRISDVHFSVKPSASASSPKLHSSAAVHRLKKDIRRCHRMSRRPLPRPDPQGGSPGLRPPISPFSETVRIINRKVKPREPKRNRIILNLKVIDKGAGGGGAGQGAGALARPKVPSRNRVIGKSKKFSESVLRTQIRHMKFGAFALYKPPPAPLVAPSPGKAEASAPGPGLLLAAPAAPYDARSSGSSGCPSPTPQSSDPDDTPPKLLPETVSPSAPSWREPEVLDLSLPPESAATSKRAPPEVTAAAGPAPPTAPEPAGASSEPEAGDWRPEMSPCSNVVVTDVTSNLLTVTIKEFCNPEDFEKVAAGVAGAAGGGGSIGASK

SEQ ID NO: 5719 - protein, 381 aa, Homo sapiens
MHLLAILFCALWSAVLAENSDDYDLMYVNLDNEIDNGLHPTEDPTPCDCGQEHSEWDKLFIMLENSQMRERMLLQATDDVLRGELQRLREELGRLAESLARPCAPGAPAEARLTSALDELLQATRDAGRRLARMEGAEAQRPEEAGRALAAVLEELRQTRADLHAVQGWAARSWLPAGCETAILFPMRSKKIFGSVHPVRPMRLESFSACIWVKATDVLNKTILFSYGTKRNPYEIQLYLSYQSIVFVVGGEENKLVAEAMVSLGRWTHLCGTWNSEEGLTSLWVNGELAATTVEMATGHIVPEGGILQIGQEKNGCCVGGGFDETLAFSGRLTGFNIWDSVLSNEEIRETGGAESCHIRGNIVGWGVTEIQPHGGAQYVS

SEQ ID NO: 5720 - protein, 311 aa, Homo sapiens
MRSLPSLGGLALLCCAAAAAAAAVASAASAGNVTGGGGAAGQVDASPGPGLRGEPSHPFPRATAPTAQAPRTGPPRATVHRPLAATSPAQSPETTPLWATAGPSSTTFQAPLGPSPTTPPAAERTSTTSQAPTRPAPTTLSTTTGPAPTTPVATTVPAPTTPRTPTPDLPSSSNSSVLPTPPATEAPSSPPPEYVCNCSVVGSLNVNRCNQTTGQCECRPGYQGLHCETCKEGFYLNYTSGLCQPCDCSPHGALSIPCNSSGKCQCKVGVIGSICDRCQDGYYGFSKNGCLPCQCNNRSASCDALTGTYFP

SEQ ID NO: 5721 - protein, 260 aa, Homo sapiens
MRSLPSLGGLALLCCAAAAAAAAVASAASAGNVTGGGGAAGQVDASPGPGLRGEPSHPFPRATAPTAQAPRTGPPRATVHRPLAATSPAQSPETTPLWATAGPSSTTFQAPLGPSPTTPPAAERTSTTSQAPTRPAPTTLSTTTGPAPTTPVATTVPAPTTPRTPTPDLPSSSNSSVLPTPPATEAPSSPPPEYVCNCSVVGSLNVNRCNQTTGQCECRPGYQGLHCETCKEGFYLNYTSGLCQPCDCSPHGALSIPCNR

SEQ ID NO: 5722 - protein, 311 aa, Homo sapiens; identical to SEQ ID NO: 5720

SEQ ID NO: 5723 - protein, 260 aa, Homo sapiens; identical to SEQ ID NO: 5721

SEQ ID NO: 5724 - protein, 525 aa, Homo sapiens
MAVPGEAEEEATVYLVVSGIPSVLRSAHLRSYFSQFREERGGGFLCFHYRHRPERAPPQAAPNSALIPTDPAAEGQLLSQTSATDVRPLSTRDSTPIQTRTCCCVISVRGLAQAQRLIRMYSGRRWLDSHGTWLPGRCLIRRLRLPTEASGLGPFPFKTRKELQSWKAENEAFTLADLKQLPELNPPVLMPRGNVGTPLRVFLELIRACRLPPRIITQLQLQFPKTGSSRRYGNVPFEYEDSETVEQEELVCTAEGEEIPQGTYLADIPASPCGEPEEEVGKEEEEESHSDEDDDRGEEWERHEALHEDVTGQERTTEQLFEEEIELKWEKGGSGLVFYTDAQFWQEEEGDFDEQTADDWDVDMSVYYDRDGGDKDARDSVQMRLEQRLRDGQEDGSVIERQVGTFERHTKGIGRKVMERQGWAEGQGLGCRCSGVPEALDSDGQHPRCKRGLGYHGEKLQPFGQLKRPRRNGLGLISTIYDEPLPQDQTESLLRRQPPTSMKFRTDMAFVRGSSCASDSPSLPD

SEQ ID NO: 5725 - protein, 380 aa, Homo sapiens
MEEIYAKFVSQKISKTRWRPLPPGSLQTAETFATGSWDNEENYISLWSIGDFGNLDSDGGFEGDHQLLCDIRHHGDVMDLQFFDQERIVAASSTGCVTVFLHHPNNQTLSVNQQWTTAHYHTGPGSPSYSSAPCTGVVCNNPEIVTVGEDGRINLFRADHKEAVRTIDNADSSTLHAVTFLRTPEILTVNSIGQLKIWDFRQQGNEPSQILSLTGDRVPLHCVDRHPNQQHVVATGGQDGMLSIWDVRQGTMPVSLLKAHEAEMWEVHFHPSNPEHLFTCSEDGSLWHWDASTDVPEKSSLFHQGGRSSTFLSHSISNQANVHQSVISSWLSTDPAKDRIEITSLLPSRSLSVNTLDVLGPCLVCGTDAEAIYVTRHLFS

SEQ ID NO: 5726 - protein, 1040 aa, Homo sapiens
MAAAPALKHWRTTLERVEKFVSPLYFTDCNLRGRLFGASCPVAVLSSFLTPERLPYQEAVQRDFRPAQVGDSFGPTWWTCWFRVELTIPEAWVGQEVHLCWESDGEGLVWRDGEPVQGLTKEGEKTSYVLTDRLGERDPRSLTLYVEVACNGLLGAGKGSMIAAPDPEKMFQLSRAELAVFHRDVHMLLVDLELLLGIAKGLGKDNQRSFQALYTANQMVNVCDPAQPETFPVAQALASRFFGQHGGESQHTIHATGHCHIDTAWLWPFKETVRKCARSWVTALQLMERNPEFIFACSQAQQLEWVKSRYPGLYSRIQEFACRGQFVPVGGTWVEMDGNLPSGEAMVRQFLQGQNFFLQEFGKMCSEFWLPDTFGYSAQLPQIMHGCGIRRFLTQKLSWNLVNSFPHHTFFWEGLDGSRVLVHFPPGDSYGMQGSVEEVLKTVANNRDKGRANHSAFLFGFGDGGGGPTQTMLDRLKRLSNTDGLPRVQLSSPRQLFSALESDSEQLCTWVGELFLELHNGTYTTHAQIKKGNRECERILHDVELLSSLALARSAQFLYPAAQLQHLWRLLLLNQFHDVVTGSCIQMVAEEAMCHYEDIRSHGNTLLSAAAAALCAGEPGPEGLLIVNTLPWKRIEVMALPKPGGAHSLALVTVPSMGYAPVPPPTSLQPLLPQQPVFVVQETDGSVTLDNGIIRVKLDPTGRLTSLVLVASGREAIAEGAVGNQFVLFDDVPLYWDAWDVMDYHLETRKPVLGQAGTLAVGTEGGLRGSAWFLLQISPNSRLSQEVVLDVGCPYVRFHTEVHWHEAHKFLKVEFPARVRSSQATYEIQFGHLQRPTHYNTSWDWARFEVWAHRWMDLSEHGFGLALLNDCKYGASVRGSILSLSLLRAPKAPDATADTGRHEFTYALMPHKGSFQDAGVIQAAYSLNFPLLALPAPSPAPATSWSAFSVSSPAVVLETVKQAESSPQRRSLVLRLYEAHGSHVDCWLHLSLPVQEAILCDLLERPDPAGHLTLRDNRLKLTFSPFQVLSLLLVLQPPPH

SEQ ID NO: 5727 - protein, 398 aa, Homo sapiens
MKTGYSDRRLAWWDARHGKRNLSVEDTEIDWKAYMAEVEGVINGTYDYTQLQGDTGPLVYPAGFVYIFMGLYYATSRGTDIRMAQNIFAVLYLATLLLVFLIYHQTCKVPPFVFFFMCCASYRVHSIFVLRLFNDPVAMVLLFLSINLLLAQRWGWGCCFFSLAVSVKMNVLLFAPGLLFLLLTQFGFRGALPKLGICAGLQVVLGLPFLLENPSGYLSRSFDLGRQFLFHWTVNWRFLPEALFLHRAFHLALLTAHLTLLLLFALCRWHRTGESILSLLRDPSKRKVPPQPLTPNQIVSTLFTSNFIGICFSRSLHYQFYVWYFHTLPYLLWAMPARWLTHLLRLLVLGLIELSWNTYPSTSCSSAALHICHAVILLQLWLGPQPFPKSTQHSKKAH

SEQ ID NO: 5728 - protein, 390 aa, Homo sapiens
MFPAQAKENAGFSGCGGDTEIDWKAYMAEVEGVINGTYDYTQLQGDTGPLVYPAGFVYIFMGLYYATSRGTDIRMAQNIFAVLYLATLLLVFLIYHQTCKVPPFVFFFMCCASYRVHSIFVLRLFNDPVAMVLLFLSINLLLAQRWGWGCCFFSLAVSVKMNVLLFAPGLLFLLLTQFGFRGALPKLGICAGLQVVLGLPFLLENPSGYLSRSFDLGRQFLFHWTVNWRFLPEALFLHRAFHLALLTAHLTLLLLFALCRWHRTGESILSLLRDPSKRKVPPQPLTPNQIVSTLFTSNFIGICFSRSLHYQFYVWYFHTLPYLLWAMPARWLTHLLRLLVLGLIELSWNTYPSTSCSSAALHICHAVILLQLWLGPQPFPKSTQHSKKAH

SEQ ID NO: 5729 - protein, 403 aa, Homo sapiens
MAAARLARAAPAAAGAALHAAGGRLPLPGGDTEIDWKAYMAEVEGVINGTYDYTQLQGDTGPLVYPAGFVYIFMGLYYATSRGTDIRMAQNIFAVLYLATLLLVFLIYHQTCKVPPFVFFFMCCASYRVHSIFVLRLFNDPVAMVLLFLSINLLLAQRWGWGCCFFSLAVSVKMNVLLFAPGLLFLLLTQFGFRGALPKLGICAGLQVVLGLPFLLENPSGYLSRSFDLGRQFLFHWTVNWRFLPEALFLHRAFHLALLTAHLTLLLLFALCRWHRTGESILSLLRDPSKRKVPPQPLTPNQIVSTLFTSNFIGICFSRSLHYQFYVWYFHTLPYLLWAMPARWLTHLLRLLVLGLIELSWNTYPSTSCSSAALHICHAVILLQLWLGPQPFPKSTQHSKKAH

SEQ ID NO: 5730 - protein, 438 aa, Homo sapiens
MAAGLRKRGRSGSAAQAEGLCKQWLQRAWQERRLLLREPRYTLLVAACLCLAEVGITFWVIHRVAYTEIDWKAYMAEVEGVINGTYDYTQLQGDTGPLVYPAGFVYIFMGLYYATSRGTDIRMAQNIFAVLYLATLLLVFLIYHQTCKVPPFVFFFMCCASYRVHSIFVLRLFNDPVAMVLLFLSINLLLAQRWGWGCCFFSLAVSVKMNVLLFAPGLLFLLLTQFGFRGALPKLGICAGLQVVLGLPFLLENPSGYLSRSFDLGRQFLFHWTVNWRFLPEALFLHRAFHLALLTAHLTLLLLFALCRWHRTGESILSLLRDPSKRKVPPQPLTPNQIVSTLFTSNFIGICFSRSLHYQFYVWYFHTLPYLLWAMPARWLTHLLRLLVLGLIELSWNTYPSTSCSSAALHICHAVILLQLWLGPQPFPKSTQHSKKAH

SEQ ID NO: 5731 - protein, 351 aa, Homo sapiens
MGDPERPEAAGLDQDERSSSDTNESEIKSNEEPLLRKSSRRFVIFPIQYPDIWKMYKQAQASFWTAEEVDLSKDLPHWNKLKADEKYFISHILAFFAASDGIVNENLVERFSQEVQVPEARCFYGFQILIENVHSEMYSLLIDTYIRDPKKREFLFNAIETMPYVKKKADWALRWIADRKSTFGERVVAFAAVEGVFFSGSFAAIFWLKKRGLMPGLTFSNELISRDEGLHCDFACLMFQYLVNKPSEERVREIIVDAVKIEQEFLTEALPVGLIGMNCILMKQYIEFVADRLLVELGFSKVFQAENPFDFMENISLEGKTNFFEKRVSEYQRFAVMAETTDNVFTLDADF

SEQ ID NO: 5732 - protein, 527 aa, Homo sapiens
MTCPDKPGQLINWFICSLCVPRVRKLWSSRRPRTRRNLLLGTACAIYLGFLVSQVGRASLQHGQAAEKGPHRSRDTAEPSFPEIPLDGTLAPPESQGNGSTLQPNVVYITLRSKRSKPANIRGTVKPKRRKKHAVASAAPGQEALVGPSLQPQEAAREADAVAPGYAQGANLVKIGERPWRLVRGPGVRAGGPDFLQPSSRESNIRIYSESAPSWLSKDDIRRMRLLADSAVAGLRPVSSRSGARLLVLEGGAPGAVLRCGPSPCGLLKQPLDMSEVFAFHLDRILGLNRTLPSVSRKAEFIQAAAAACLSMRLAFFIFPAWEDMRVPGKCCIGHARLTWGTYQQLLKQKCWQNGRVPKPESGCTEIHHHEWSKMALFDFLLQIYNRLDTNCCGFRPRKEDACVQNGLRPKCDDQGSAALAHIIQRKHDPRHLVFIDNKSFFDRSEDNLNFKLLEGIKEFPASAVSVLKSQHLRQKLLQSLFLDKVYWESQGGRQGIEKLIDVIEHRAKILITYINAHGVKVLPMNE

SEQ ID NO: 5733 - protein, 519 aa, Homo sapiens
MTCPDKPGQLINWFICSLCVPRVRKLWSSRRPRTRRNLLLGTACAIYLGFLVSQVGRASLQHGQAAEKGPHRSRDTAEPSFPEIPLDGTLAPPESQGNGSTLQPNVVYITLRSKRSKPANIRGTVKPKRRKKHAVASAAPGQEALVGPSLQPQEAAREADAVAPGYAQGANLVKIGERPWRLVRGPGVRAGGPDFLQPSSRESNIRIYSESAPSWLSKDDIRRMRLLADSAVAGLRPVSSRSGARLLVLEGGAPGAVLRCGPSPCGLLKQPLDMSEVFAFHLDRILGLNRTLPSVSRKAEFIQDGRPCPIILWDASLSSASNDTHSSVKLTWGTYQQLLKQKCWQNGRVPKPESGCTEIHHHEWSKMALFDFLLQIYNRLDTNCCGFRPRKEDACVQNGLRPKCDDQGSAALAHIIQRKHDPRHLVFIDNKGFFDRSEDNLNFKLLEGIKEFPASAVSVLKSQHLRQKLLQSLFLDKVYWESQGGRQGIEKLIDVIEHRAKILITYINAHGVKVLPMNE

SEQ ID NO: 5734 - protein, 975 aa, Homo sapiens
MEDYEQELCGVEDDFHNQFAAELEVLAELEGASTPSPSGVPLFTAGRPPRTFEEALARGDAASSPAPAASVGSSQGGARKRQVDADLQPAGSLPHAPRIKRPRLQVVKRLNFRSEEMEEPPPPDSSPTDITPPPSPEDLAELWGHGVSEAAADVGLTRASPAARNPVLRRPPILEDYVHVTSTEGVRAYLVLRADPMAPGVQGSLLHVPWRGGGQLDLLGVSLASLKKQVDGERRERLLQEAQKLSDTLHSLRSGEEEAAQPLGAPEEEPTDGQDASSHCLWVDEFAPRHYTELLSDDFTNRCLLKWLKLWDLVVFGHERPSRKPRPSVEPARVSKEATAPGKWKSHEQVLEEMLEAGLDPSQRPKQKVALLCGPPGLGKTTLAHVIARHAGYSVVEMNASDDRSPEVFRTRIEAATQMESVLGAGGKPNCLVIDEIDGAPVAAINVLLSILNRKGPQEVGPQGPAVPSGGGRRRRAEGGLLMRPIICICNDQFAPSLRQLKQQAFLLHFPPTLPSRLVQRLQEVSLRQGMRADPGVLAALCEKTDNDIRACINTLQFLYSRGQRELSVRDVQATRVGLKDQRRGLFSVWQEVFQLPRAQRRRVGQDPALPADTLLLGDGDAGSLTSASQRFYRVLHAAASAGEHEKVVQGLFDNFLRLRLRDSSLGAVCVALDWLAFDDLLAGAAHHSQSFQLLRYPPFLPVAFHVLFASSHTPRITFPSSQQEAQNRMSQMRNLIQTLVSGIAPATRSRATPQALLLDALCLLLDILAPKLRPVSTQLYSTREKQQLASLVGTMLAYSLTYRQERTPDGQYIYRLEPNVEELCRFPELPARKPLTYQTKQLIAREIEVEKMRRAEASARVENSPQVDGSPPGLEGLLGGIGEKGVHRPAPRNHEQRLEHIMRRAAREEQPEKDFFGRVVVRSTAVPSAGDTAPEQDSVERRMGTAVGRSEVWFRFNEGVSNAVRRSLYIRDLL

SEQ ID NO: 5735 - protein, 262 aa, Homo sapiens
MAAPSGTVSDSESSNSSSDAEELERCREAAMPAWGLEQRPHVAGKPRAGAANSQLSTSQPSLRHKVNEHEQDGNELQTTPEFRAHVAKKLGALLDSFITISEAAKEPAKAKVQKVALEDDGFRLFFTSVPGGREKEESPQPRRKRQPSSSSEDSDEEWRRCREAAVSASDILQESAIHSPGTVEKEAKKKRKLKKKAKKVASVDSAVAATTPTSMATVQKQKSGELNGDQVSLGTKKKKKAKKASETSPFPPAKSATAIPAN

SEQ ID NO: 5736 - protein, 2715 aa, Homo sapiens
MAAAAGGGSCPGPGSARGRFPGRPRGAGGGGGRGGRGNGAERVRVALRRGGGATGPGGAEPGEDTALLRLLGLRRGLRRLRRLWAGPRVQRGRGRGRGRGWGPSRGCVPEEESSDGESDEEEFQGFHSDEDVAPSSLRSALRSQRGRAPRGRGRKHKTTPLPPPRLADVAPTPPKTPARKRGEEGTERMVQALTELLRRAQAPQAPRSRACEPSTPRRSRGRPPGRPAGPCRRKQQAVVVAEAAVTIPKPEPPPPVVPVKHQTGSWKCKEGPGPGPGTPRRGGQSSRGGRGGRGRGRGGGLPFVIKFVSRAKKVKMGQLSLGLESGQGQGQHEESWQDVPQRRVGSGQGGSPCWKKQEQKLDDEEEEKKEEEEKDKEGEEKEERAVAEEMMPAAEKEEAKLPPPPLTPPAPSPPPPLPPPSTSPPPPLCPPPPPPVSPPPLPSPPPPPAQEEQEESPPPVVPATCSRKRGRPPLTPSQRAEREAARAGPEGTSPPTPTPSTATGGPPEDSPTVAPKSTTFLKNIRQFIMPVVSARSSRVIKTPRRFMDEDPPKPPKVEVSPVLRPPITTSPPVPQEPAPVPSPPRAPTPPSTPVPLPEKRRSILREPTFRWTSLTRELPPPPPAPPPPPAPSPPPAPATSSRRPLLLRAPQFTPSEAHLKIYESVLTPPPLGAPEAPEPEPPPADDSPAEPEPRAVGRTNHLSLPRFAPVVTTPVKAEVSPHGAPALSNGPQTQAQLLQPLQALQTQLLPQALPPPQPQLQPPPSPQQMPPLEKARIAGVGSLPLSGVEEKMFSLLKRAKVQLFKIDQQQQQKVAASMPLSPGGQMEEVAGAVKQISDRGPVRSEDESVEAKRERPSGPESPVQGPRIKHVCRHAAVALGQARAMVPEDVPRLSALPLRDRQDLATEDTSSASETESVPSRSRRGKVEAAGPGGESEPTGSGGTLAHTPRRSLPSHHGKKMRMARCGHCRGCLRVQDCGSCVNCLDKPKFGGPNTKKQCCVYRKCDKIEARKMERLAKKGRTIVKTLLPWDSDESPEASPGPPGPRRGAGAGGPREEVVAHPGPEEQDSLLQRKSARRCVKQRPSYDIFEDSDDSEPGGPPAPRRRTPRENELPLPEPEEQSRPRKPTLQPVLQLKARRRLDKDALAPGPFASFPNGWTGKQKSPDGVHRVRVDFKEDCDLENVWLMGGLSVLTSVPGGPPMVCLLCASKGLHELVFCQVCCDPFHPFCLEEAERPLPQHHDTWCCRRCKFCHVCGRKGRGSKHLLECERCRHAYHPACLGPSYPTRATRKRRHWICSACVRCKSCGATPGKNWDVEWSGDYSLCPRCTQLYEKGNYCPICTRCYEDNDYESKMMQCAQCDHWVHAKCEGLSDEDYEILSGLPDSVLYTCGPCAGAAQPRWREALSGALQGGLRQVLQGLLSSKVVGPLLLCTQCGPDGKQLHPGPCGLQAVSQRFEDGHYKSVHSFMEDMVGILMRHSEEGETPDRRAGGQMKGLLLKLLESAFGWFDAHDPKYWRRSTRLPNGVLPNAVLPPSLDHVYAQWRQQEPETPESGQPPGDPSAAFQGKDPAAFSHLEDPRQCALCLKYGDADSKEAGRLLYIGQNEWTHVNCAIWSAEVFEENDGSLKNVHAAVARGRQMRCELCLKPGATVGCCLSSCLSNFHFMCARASYCIFQDDKKVFCQKHTDLLDGKEIVNPDGFDVLRRVYVDFEGINFKRKFLTGLEPDAINVLIGSIRIDSLGTLSDLSDCEGRLFPIGYQCSRLYWSTVDARRRCWYRCRILEYRPWGPREEPAHLEAAEENQTIVHSPAPSSEPPGGEDPPLDTDVLVPGAPERHSPIQNLDPPLRPDSGSAPPPAPRSFSGARIKVPNYSPSRRPLGGVSFGPLPSPGSPSSLTHHIPTVGDPDFPAPPRRSRRPSPLAPRPPPSRWASPPLKTSPQLRVPPPTSVVTALTPTSGELAPPGPAPSPPPPEDLGPDFEDMEVVSGLSAADLDFAASLLGTEPFQEEIVAAGAMGSSHGGPGDSSEEESSPTSRYIHFPVTVVSAPGLAPSATPGAPRIEQLDGVDDGTDSEAEAVQQPRGQGTPPSGPGVVRAGVLGAAGDRARPPEDLPSEIVDFVLKNLGGPGDGGAGPREESLPPAPPLANGSQPSQGLTASPADPTRTFAWLPGAPGVRVLSLGPAPEPPKPATSKIILVNKLGQVFVKMAGEGEPVPPPVKQPPLPPTISPTAPTSWTLPPGPLLGVLPVVGVVRPAPPPPPPPLTLVLSSGPASPPRQAIRVKRVSTFSGRSPPAPPPYKAPRLDEDGEASEDTPQVPGLGSGGFSRVRMKTPTVRGVLDLDRPGEPAGEESPGPLQERSPLLPLPEDGPPQVPDGPPDLLLESQWHHYSGEASSSEEEPPSPDDKENQAPKRTGPHLRFEISSEDGFSVEAESLEGAWRTLIEKVQEARGHARLRHLSFSGMSGARLLGIHHDAVIFLAEQLPGAQRCQHYKFRYHQQGEGQEEPPLNPHGAARAEVYLRKCTFDMFNFLASQHRVLPEGATCDEEEDEVQLRSTRRATSLELPMAMRFRHLKKTSKEAVGVYRSAIHGRGLFCKRNIDAGEMVIEYSGIVIRSVLTDKREKFYDGKGIGCYMFRMDDFDVVDATMHGNAARFINHSCEPNCFSRVIHVEGQKHIVIFALRRILRGEELTYDYKFPIEDASNKLPCNCGAKRCRRFLN

SEQ ID NO: 5737 - protein, 1173 aa, Homo sapiens
MSRGSIEIPLRDTDEVIELDFDQLPEGDEVISILKQEHTQLHIWIALALEYYKQGKTEEFVKLLEAARIDGNLDYRDHEKDQMTCLDTLAAYYVQQARKEKNKDNKKDLITQATLLYTMADKIIMYDQNHLLGRACFCLLEGDKMDQADAQFHFVLNQSPNNIPALLGKACISFNKKDYRGALAYYKKALRTNPGCPAEVRLGMGHCFVKLNKLEKARLAFSRALELNSKCVGALVGLAVLELNNKEADSIKNGVQLLSRAYTIDPSNPMVLNHLANHFFFKKDYSKVQHLALHAFHNTEVEAMQAESCYQLARSFHVQEDYDQAFQYYYQATQFASSSFVLPFFGLGQMYIYRGDKENASQCFEKVLKAYPNNYETMKILGSLYAASEDQEKRDIAKGHLKKVTEQYPDDVEAWIELAQILEQTDIQGALSAYGTATRILQEKVQADVPPEILNNVGALHFRLGNLGEAKKYFLASLDRAKAEAEHDEHYYNAISVTTSYNLARLYEAMCEFHEAEKLYKNILREHPNYVDCYLRLGAMARDKGNFYEASDWFKEALQINQDHPDAWSLIGNLHLAKQEWGPGQKKFERILKQPSTQSDTYSMLALGNVWLQTLHQPTRDREKEKRHQDRALAIYKQVLRNDAKNLYAANGIGAVLAHKGYFREARDVFAQVREATADISDVWLNLAHIYVEQKQYISAVQMYENCLRKFYKHQNTEVVLYLARALFKCGKLQECKQTLLKARHVAPSDTVLMFNVALVLQRLATSVLKDEKSNLKEVLNAVKELELAHRYFSYLSKVGDKMRFDLALAATEARQCSDLLSQAQYHVARARKQDEEERELRAKQEQEKELLRQKLLKEQEEKRLREKEEQKKLLEQRAQYVEKTKNILMFTGETEATKEKKRGGGGGRRSKKGGEFDEFVNDDTDDDLPISKKKKRRKGSGSEQEGEDEEGGERKKKKRRRHPKGEEGSDDDETENGPKPKKRRPPKAEKKKAPKPERLPPSMKGKIKSKAIISSSDDSSDEDKLKIADEGHPRNSNSNSDSDEDEQRKKCASSESDSDENQNKSGSEAGSPRRPRRQRSDQDSDSDQPSRKRRPSGSEQSDNESVQSGRSHSGVSENDSRPASPSAESDHESERGSDNEGSGQGSGNESEPEGSNNEASDRGSEHGSDDSD

SEQ ID NO: 5738 - protein, 207 aa, Homo sapiens
MSSDRQRSDDESPSTSSGSSDADQRDPAAPEPEEQEERKPSATQQKKNTKLSSKTTAKLSTSAKRIQKELAEITLDPPPNCSAGPKGDNIYEWRSTILGPPGSVYEGGVFFLDITFSSDYPFKPPKVTFRTRIYHCNINSQGVICLDILKDNWSPALTISKVLLSICSLLTDCNPADPLVGSIATQYLTNRAEHDRIARQWTKRYAT

SEQ ID NO: 5739 - protein, 207 aa, Homo sapiens; identical to SEQ ID NO: 5738

SEQ ID NO: 5740 - protein, 602 aa, Homo sapiens
MDSRVSELFGGCCRPGGGPAVGGTLKARGAGSSSGCGGPKGKKKNGRNRGGKANNPPYLPPEAEDGNIEYKLKLVNPSQYRFEHLVTQMKWRLQEGRGEAVYQIGVEDNGLLVGLAEEEMRASLKTLHRMAEKVGADITVLREREVDYDSDMPRKITEVLVRKVPDNQQFLDLRVAVLGNVDSGKSTLLGVLTQGELDNGRGRARLNLFRHLHEIQSGRTSSISFEILGFNSKGEVVNYSDSRTAEEICESSSKMITFIDLAGHHKYLHTTIFGLTSYCPDCALLLVSANTGIAGTTREHLGLALALKVPFFIVVSKIDLCAKTTVERTVRQLERVLKQPGCHKVPMLVTSEDDAVTAAQQFAQSPNVTPIFTLSSVSGESLDLLKVFLNILPPLTNSKEQEELMQQLTEFQVDEIYTVPEVGTVVGGTLSSGICREGDQLVVGPTDDGCFLELRVCSIQRNRSACRVLRAGQAATLALGDFDRALLRKGMVMVSPEMNPTICSVFEAEIVLLFHATTFRRGFQVTVHVGNVRQTAVVEKIHAKDKLRTGEKAVVRFRFLKHPEYLKVGAKLLFREGVTKGIGHVTDVQAITAGEAQANMGF

SEQ ID NO: 5741 - protein, 335 aa, Homo sapiens
MKLPARVFFTLGSRLPCGLAPRRFFSYGTKILYQNTEALQSKFFSPLQKAMLPPNSFQGKVAFITGGGTGLGKGMTTLLSSLGAQCVIASRKMDVLKATAEQISSQTGNKVHAIQCDVRDPDMVQNTVSELIKVAGHPNIVINNAAGNFISPTERLSPNAWKTITDIVLNGTAFVTLEIGKQLIKAQKGAAFLSITTIYAETGSGFVVPSASAKAGVEAMSKSLAAEWGKYGMRFNVIQPGPIKTKGAFSRLDPTGTFEKEMIGRIPCGRLGTVEELANLAAFLCSDYASWINGAVIKFDGGEEVLISGEFNDLRKVTKEQWDTIEELIRKTKGS

SEQ ID NO: 5742 - protein, 703 aa, Homo sapiens
MEALLEGIQNRGHGGGFLTSCEAELQELMKQIDIMVAHKKSEWEGRTHALETCLKIREQELKSLRSQLDVTHKEVGMLHQQVEEHEKIKQEMTMEYKQELKKLHEELCILKRSYEKLQKKQMREFRGNTKNHREDRSEIERLTAKIEEFRQKSLDWEKQRLIYQQQVSSLEAQRKALAEQSEIIQAQLVNRKQKLESVELSSQSEIQHLSSKLERANDTICANELEIERLTMRVNDLVGTSMTVLQEQQQKEEKLRESEKLLEALQEEKRELKAALQSQENLIHEARIQKEKLQEKVKATNTQHAVEAIRPREESLAEKKYTSQGQGDLDSVLSQLNFTHTSEDLLQAEVTCLEGSLESVSATCKQLSQELMEKYEELKRMEAHNNEYKAEIKKLKEQILQGEQSYSSALEGMKMEISHLTQELHQRDITIASTKGSSSDMEKRLRAEMQKAEDKAVEHKEILDQLESLKLENRHLSEMVMKLELGLHEAKEISLADLQENYIEALNKLVSENQQLQKDLMNTKSQLEISTQMCKKQNDRIFKPTHSRTTEFKNTEFKPTHGQHRHDGIKTEHYKTDLHSPRGQASDSINPMSRVLSPLSPQISPCSSTRSLTSYSLCKTHSLPSALDTNEANFSDTMSESMNDQEEFISSCSLPVSPLGSIATRFLEEEELRSHHILERLDAHIEELKRESEKTVRQFTALK

SEQ ID NO: 5743 - protein, 247 aa, Homo sapiens
MPGRSSSNSGSTGFISFSGVESALSSLKNFQACINSGMDTASSVALDLVESQTEVSSEYSMDKAMVEFATLDRQLNHYVKAVQSTINHVKEERPEKIPDLKLLVEKKFLALQSKNSDADFQNNEKFVQFKQQLKELKKQCGLQADREADGTEGVDEDIIVTQSQTNFTCPITKEEMKKPVKNKVCGHTYEEDAIVRMIESRQKRKKKAYCPQIGCSHTDIRKSDLIQDEALRRAIENHNKKRHRHSE

SEQ ID NO: 5744 - protein, 548 aa, Homo sapiens
MQGLLRFEDQDSARGDQNIAMFYPTSTQMVYRRGLQAIPLSVDLWIHYINFLKETLDPGDPETNNTIRGTFEHAVLAAGTDFRSDRLWEMYINWENEQGNLREVTAIYDRILGIPTQLYSHHFQRFKEHVQNNLPRDLLTGEQFIQLRRELASVNGHSGDDGPPGDDLPSGIEDITDPAKLITEIENMRHRIIEIHQEMFNYNEHEVSKRWTFEEGIKRPYFHVKPLEKAQLKNWKEYLEFEIENGTHERVVVLFERCVISCALYEEFWIKYAKYMENHSIEGVRHVFSRACTIHLPKKPMVHMLWAAFEEQQGNINEARNILKTFEECVLGLAMVRLRRVSLERRHGNLEEAEHLLQDAIKNAKSNNESSFYAVKLARHLFKIQKNLPKSRKVLLEAIERDKENTKLYLNLLEMEYSGDLKQNEENILNCFDKAVHGSLPIKMRITFSQRKVEFLEDFGSDVNKLLNAYDEHQTLLKEQDSLKRKAENGSEEPEEKKAHTEDTTSSSTQMIDGDLQANQAVYNYSAWYQYNYQNPWNYGQYYPPPPT

SEQ ID NO: 5745 - protein, 106 aa, Homo sapiens
MALDPADQHLRHVEKDVLIPKIMREKAKERCSEQVQDFTKCCKNSGVLMVVKCRKENSALKECLTAYYNDPAFYEECKMEYLKEREEFRKTGIPTKKRLQKLPTSM

SEQ ID NO: 5746 - protein, 1350 aa, Homo sapiens
MGLLGQDLFVTSFLCPTWPSPSGAHGLREEPEFVTARAGESVVLRCDVIHPVTGQPPPYVVEWFKFGVPIPIFIKFGYYPPHVDPEYAGRASLHDKASLRLEQVRSEDQGWYECKVLMLDQQYDTFHNGSWVHLTINAPPTFTETPPQYIEAKEGGSITMTCTAFGNPKPIVTWLKEGTLLGASGKYQVSDGSLTVTSVSREDRGAYTCRAYSIQGEAVHTTHLLVQGPPFIVSPPENITVNISQDALLTCRAEAYPGNLTYTWYWQDENVYFQNDLKLRVRILIDGTLIIFRVKPEDSGKYTCVPSNSLGRSPSASAYLTVQYPARVLNMPPVIYVPVGIHGYIRCPVDAEPPATVVKWNKDGRPLQVEKNLGWTLMEDGSIRIEEATEEALGTYTCVPYNTLGTMGQSAPARLVLKDPPYFTVLPGWEYRQEAGRELLIPCAAAGDPFPVITWRKVGKPSRSKHSALPSGSLQFRALSKEDHGEWECVATNVVTSITASTHLTVIGTSPHAPGSVRVQVSMTTANVSWEPGYDGGYEQTFSVWMKRAQFGPHDWLSLPVPPGPSWLLVDTLEPETAYQFSVLAQNKLGTSAFSEVVTVNTLAFPITTPEPLVLVTPPRCLIANRTQQGVLLSWLPPANHSFPIDRYIMEFRVAERWELLDDGIPGTEGEFFAKDLSQDTWYEFRVLAVMQDLISEPSNIAGVSSTDIFPQPDLTEDGLARPVLAGIVATICFLAAAILFSTLAACFVNKQRKRKLKRKKDPPLSITHCRKSLESPLSSGKVSPESIRTLRAPSESSDDQGQPAAKRMLSPTREKELSLYKKTKRAISSKKYSVAKAEAEAEATTPIELISRGPDGRFVMDPAEMEPSLKSRRIEGFPFAEETDMYPEFRQSDEENEDPLVPTSVAALKSQLTPLSSSQESYLPPPAYSPRFQPRGLEGPGGLEGRLQATGQARPPAPRPFHHGQYYGYLSSSSPGEVEPPPFYVPEVGSPLSSVMSSPPLPTEGPFGHPTIPEENGENASNSTLPLTQTPTGGRSPEPWGRPEFPFGGLETPAMMFPHQLPPCDVPESLQPKAGLPRGLPPTSLQVPAAYPGILSLEAPKGWAGKSPGRGPVPAPPAAKWQDRPMQPLVSQGQLRHTSQGMGIPVLPYPEPAEPGAHGGPSTFGLDTRWYEPQPRPRPSPRQARRAEPSLHQVVLQPSRLSPLTQSPLSSRTGSPELAARARPRPGLLQQAEMSEITLQPPAAVSFSRKSTPSTGSPSQSSRSGSPSYRPAMGFTTLATGYPSPPPGPAPAGPGDSLDVFGQTPSPRRTGEELLRPETPPPTLPTSGKLQRDRPAPATSPPERALSKL

SEQ ID NO: 5747 - protein, 1350 aa, Homo sapiens; identical to SEQ ID NO: 5746

SEQ ID NO: 5748 - protein, 280 aa, Homo sapiens
MLGQQQQQLYSSAALLTGERSRLLTCYVQDYLECVESLPHDMQRNVSVLRELDNKYQETLKEIDDVYEKYKKEDDLNQKKRLQQLLQRALINSQELGDEKIQIVTQMLELVENRARQMELHSQCFQDPAESERASDKAKMDSSQPERSSRRPRRQRTSESRDLCHMANGIEDCDDQPPKEKKSKSAKKKKRSKAKQEREASPVEFAIDPNEPTYCLCNQVSYGEMIGCDNEQCPIEWFHFSCVSLTYKPKGKWYCPKCRGDNEKTMDKSTEKTKKDRRSR

SEQ ID NO: 5749 - protein, 932 aa, Homo sapiens
MAVVIRLQGLPIVAGTMDIRHFFSGLTIPDGGVHIVGGELGEAFIVFATDEDARLGMMRTGGTIKGSKVTLLLSSKTEMQNMIELSRRRFETANLDIPPANASRSGPPPSSGMSSRVNLPTTVSNFNNPSPSVVTATTSVHESNKNIQTFSTASVGTAPPNMGASFGSPTFSSTVPSTASPMNTVPPPPIPPIPAMPSLPPMPSIPPIPVPPPVPTLPPVPPVPPIPPVPSVPPMTPLPPMSGMPPLNPPPVAPLPAGMNGSGAPMNLNNNLNPMFLGPLNPVNPIQMNSQSSVKPLPINPDDLYVSVHGMPFSAMENDVRDFFHGLRVDAVHLLKDHVGRNNGNGLVKFLSPQDTFEALKRNRMLMIQRYVEVSPATERQWVAAGGHITFKQNMGPSGQTHPPPQTLPRSKSPSGQKRSRSRSPHEAGFCVYLKGLPFEAENKHVIDFFKKLDIVEDSIYIAYGPNGKATGEGFVEFRNEADYKAALCRHKQYMGNRFIQVHPITKKGMLEKIDMIRKRLQNFSYDQREMILNPEGDVNSAKVCAHITNIPFSITKMDVLQFLEGIPVDENAVHVLVDNNGQGLGQALVQFKNEDDARKSERLHRKKLNGREAFVHVVTLEDMREIEKNPPAQGKKGLKMPVPGNPAVPGMPNAGLPGVGLPSAGLPGAGLPSTGLPGSAITSAGLPGAGMPSAGIPSAGGEEHAFLTVGSKEANNGPPFNFPGNFGGSNAFGPPIPPPGLGGGAFGDARPGMPSVGNSGLPGLGLDVPGFGGGPNNLSGPSGFGGGPQNFGNGPGSLGGPPGFGSGPPGLGSAPGHLGGPPAFGPGPGPGPGPGPIHIGGPPGFASSSGKPGPTVIKVQNMPFTVSIDEILDFFYGYQVIPGSVCLKYNEKGMPTGEAMVAFESRDEATAAVIDLNDRPIGSRKVKLVLG

SEQ ID NO: 5750 - protein, 932 aa, Homo sapiens; identical to SEQ ID NO: 5749

SEQ ID NO: 5751 - protein, 450 aa, Homo sapiens
MEQAPPDPERQLQPAPLEPLGSPDAGLGAAVGKEAEGAGEESSGVDTMTHNNFWLKKIEISVSEAEKRTGRNAMNMQETYTAYLIETRSVEHTDGQSVLTDSLWRRYSEFELLRSYLLVYYPHIVVPPLPEKRAEFVWHKLSADNMDPDFVERRRIGLENFLLRIASHPILCRDKIFYLFLTQEGNWKETVNETGFQLKADSRLKALNATFRVKNPDKRFTDLKHYSDELQSVISHLLRVRARVADRLYGVYKVHGNYGRVFSEWSAIEKEMGDGLQSAGHHMDVYASSIDDILEDEEHYADQLKEYLFYAEALRAVCRKHELMQYDLEMAAQDLASKKQQCEELVTGTVRTFSLKGMTTKLFGQETPEQREARIKVLEEQINEGEQQLKSKNLEGREFVKNAWADIERFKEQKNRDLKEALISYAVMQISMCKKGIQVWTNAKECFSKM

SEQ ID NO: 5752 - protein, 2285 aa, Homo sapiens
MAAQVAPAAASSLGNPPPPPPSELKKAEQQQREEAGGEAAAAAAAERGEMKAAAGQESEGPAVGPPQPLGKELQDGAESNGGGGGGGAGSGGGPGAEPDLKNSNGNAGPRPALNNNLTEPPGGGGGGSSDGVGAPPHSAAAALPPPAYGFGQPYGRSPSAVAAAAAAVFHQQHGGQQSPGLAALQSGGGGGLEPYAGPQQNSHDHGFPNHQYNSYYPNRSAYPPPAPAYALSSPRGGTPGSGAAAAAGSKPPPSSSASASSSSSSFAQQRFGAMGGGGPSAAGGGTPQPTATPTLNQLLTSPSSARGYQGYPGGDYSGGPQDGGAGKGPADMASQCWGAAAAAAAAAAASGGAQQRSHHAPMSPGSSGGGGQPLARTPQPSSPMDQMGKMRPQPYGGTNPYSQQQGPPSGPQQGHGYPGQPYGSQTPQRYPMTMQGRAQSAMGGLSYTQQIPPYGQQGPSGYGQQGQTPYYNQQSPHPQQQQPPYSQQPPSQTPHAQPSYQQQPQSQPPQLQSSQPPYSQQPSQPPHQQSPAPYPSQQSTTQQHPQSQPPYSQPQAQSPYQQQQPQQPAPSTLSQQAAYPQPQSQQSQQTAYSQQRFPPPQELSQDSFGSQASSAPSMTSSKGGQEDMNLSLQSRPSSLPDLSGSIDDLPMGTEGALSPGVSTSGISSSQGEQSNPAQSPFSPHTSPHLPGIRGPSPSPVGSPASVAQSRSGPLSPAAVPGNQMPPRPPSGQSDSIMHPSMNQSSIAQDRGYMQRNPQMPQYSSPQPGSALSPRQPSGGQIHTGMGSYQQNSMGSYGPQGGQYGPQGGYPRQPNYNALPNANYPSAGMAGGINPMGAGGQMHGQPGIPPYGTLPPGRMSHASMGNRPYGPNMANMPPQVGSGMCPPPGGMNRKTQETAVAMHVAANSIQNRPPGYPNMNQGGMMGTGPPYGQGINSMAGMINPQGPPYSMGGTMANNSAGMAASPEMMGLGDVKLTPATKMNNKADGTPKTESKSKKSSSSTTTNEKITKLYELGGEPERKMWVDRYLAFTEEKAMGMTNLPAVGRKPLDLYRLYVSVKEIGGLTQVNKNKKWRELATNLNVGTSSSAASSLKKQYIQCLYAFECKIERGEDPPPDIFAAADSKKSQPKIQPPSPAGSGSMQGPQTPQSTSSSMAEGGDLKPPTPASTPHSQIPPLPGMSRSNSVGIQDAFNDGSDSTFQKRNSMTPNPGYQPSMNTSDMMGRMSYEPNKDPYGSMRKAPGSDPFMSSGQGPNGGMGDPYSRAAGPGLGNVAMGPRQHYPYGGPYDRVRTEPGIGPEGNMSTGAPQPNLMPSNPDSGMYSPSRYPPQQQQQQQQRHDSYGNQFSTQGTPSGSPFPSQQTTMYQQQQQNYKRPMDGTYGPPAKRHEGEMYSVPYSTGQGQPQQQQLPPAQPQPASQQQAAQPSPQQDVYNQYGNAYPATATAATERRPAGGPQNQFPFQFGRDRVSAPPGTNAQQNMPPQMMGGPIQASAEVAQQGTMWQGRNDMTYNYANRQSTGSAPQGPAYHGVNRTDEMLHTDQRANHEGSWPSHGTRQPPYGPSAPVPPMTRPPPSNYQPPPSMQNHIPQVSSPAPLPRPMENRTSPSKSPFLHSGMKMQKAGPPVPASHIAPAPVQPPMIRRDITFPPGSVEATQPVLKQRRRLTMKDIGTPEAWRVMMSLKSGLLAESTWALDTINILLYDDNSIMTFNLSQLPGLLELLVEYFRRCLIEIFGILKEYEVGDPGQRTLLDPGRFSKVSSPAPMEGGEEEEELLGPKLEEEEEEEVVENDEEIAFSGKDKPASENSEEKLISKFDKLPVKIVQKNDPFVVDCSDKLGRVQEFDSGLLHWRIGGGDTTEHIQTHFESKTELLPSRPHAPCPPAPRKHVTTAEGTPGTTDQEGPPPDGPPEKRITATMDDMLSTRSSTLTEDGAKSSEAIKESSKFPFGISPAQSHRNIKILEDEPHSKDETPLCTLLDWQDSLAKRCVCVSNTIRSLSFVPGNDFEMSKHPGLLLILGKLILLHHKHPERKQAPLTYEKEEEQDQGVSCNKVEWWWDCLEMLRENTLVTLANISGQLDLSPYPESICLPVLDGLLHWAVCPSAEAQDPFSTLGPNAVLSPQRLVLETLSKLSIQDNNVDLILATPPFSRLEKLYSTMVRFLSDRKNPVCREMAVVLLANLAQGDSLAARAIAVQKGSIGNLLGFLEDSLAATQFQQSQASLLHMQNPPFEPTSVDMMRRAARALLALAKVDENHSEFTLYESRLLDISVSPLMNSLVSQVICDVLFLIGQS

SEQ ID NO: 5753 - protein, 1374 aa, Homo sapiens
MAAQVAPAAASSLGNPPPPPPSELKKAEQQQREEAGGEAAAAAAAERGEMKAAAGQESEGPAVGPPQPLGKELQDGAESNGGGGGGGAGSGGGPGAEPDLKNSNGNAGPRPALNNNLTEPPGGGGGGSSDGVGAPPHSAAAALPPPAYGFGQPYGRSPSAVAAAAAAVFHQQHGGQQSPGLAALQSGGGGGLEPYAGPQQNSHDHGFPNHQYNSYYPNRSAYPPPAPAYALSSPRGGTPGSGAAAAAGSKPPPSSSASASSSSSSFAQQRFGAMGGGGPSAAGGGTPQPTATPTLNQLLTSPSSARGYQGYPGGDYSGGPQDGGAGKGPADMASQCWGAAAAAAAAAAASGGAQQRSHHAPMSPGSSGGGGQPLARTPQPSSPMDQMGKMRPQPYGGTNPYSQQQGPPSGPQQGHGYPGQPYGSQTPQRYPMTMQGRAQSAMGGLSYTQQIPPYGQQGPSGYGQQGQTPYYNQQSPHPQQQQPPYSQQPPSQTPHAQPSYQQQPQSQPPQLQSSQPPYSQQPSQPPHQQSPAPYPSQQSTTQQHPQSQPPYSQPQAQSPYQQQQPQQPAPSTLSQQAAYPQPQSQQSQQTAYSQQRFPPPQELSQDSFGSQASSAPSMTSSKGGQEDMNLSLQSRPSSLPDLSGSIDDLPMGTEGALSPGVSTSGISSSQGEQSNPAQSPFSPHTSPHLPGIRGPSPSPVGSPASVAQSRSGPLSPAAVPGNQMPPRPPSGQSDSIMHPSMNQSSIAQDRGYMQRNPQMPQYSSPQPGSALSPRQPSGGQIHTGMGSYQQNSMGSYGPQGGQYGPQGGYPRQPNYNALPNANYPSAGMAGGINPMGAGGQMHGQPGIPPYGTLPPGRMSHASMGNRPYGPNMANMPPQVGSGMCPPPGGMNRKTQETAVAMHVAANSIQNRPPGYPNMNQGGMMGTGPPYGQGINSMAGMINPQGPPYSMGGTMANNSAGMAASPEMMGLGDVKLTPATKMNNKADGTPKTESKSKKSSSSTTTNEKITKLYELGGEPERKMWVDRYLAFTEEKAMGMTNLPAVGRKPLDLYRLYVSVKEIGGLTQVNKNKKWRELATNLNVGTSSSAASSLKKQYIQCLYAFECKIERGEDPPPDIFAAADSKKSQPKIQPPSPAGSGSMQGPQTPQSTSSSMAEGGDLKPPTPASTPHSQIPPLPGMSRSNSVGIQDAFNDGSDSTFQKRNSMTPNPGYQPSMNTSDMMGRMSYEPNKDPYGSMRKAPGSDPFMSSGQGPNGGMGDPYSRAAGPGLGNVAMGPRQHYPYGGPYDRVRTEPGIGPEGNMSTGAPQPNLMPSNPDSGMYSPSRYPPQQQQQQQQRHDSYGNQFSTQGTPSGSPFPSQQTTMYQQQQQEPRRHGG

SEQ ID NO: 5754 - protein, 2068 aa, Homo sapiens
MAAQVAPAAASSLGNPPPPPPSELKKAEQQQREEAGGEAAAAAAAERGEMKAAAGQESEGPAVGPPQPLGKELQDGAESNGGGGGGGAGSGGGPGAEPDLKNSNGNAGPRPALNNNLTEPPGGGGGGSSDGVGAPPHSAAAALPPPAYGFGQPYGRSPSAVAAAAAAVFHQQHGGQQSPGLAALQSGGGGGLEPYAGPQQNSHDHGFPNHQYNSYYPNRSAYPPPAPAYALSSPRGGTPGSGAAAAAGSKPPPSSSASASSSSSSFAQQRFGAMGGGGPSAAGGGTPQPTATPTLNQLLTSPSSARGYQGYPGGDYSGGPQDGGAGKGPADMASQCWGAAAAAAAAAAASGGAQQRSHHAPMSPGSSGGGGQPLARTPQPSSPMDQMGKMRPQPYGGTNPYSQQQGPPSGPQQGHGYPGQPYGSQTPQRYPMTMQGRAQSAMGGLSYTQQIPPYGQQGPSGYGQQGQTPYYNQQSPHPQQQQPPYSQQPPSQTPHAQPSYQQQPQSQPPQLQSSQPPYSQQPSQPPHQQSPAPYPSQQSTTQQHPQSQPPYSQPQAQSPYQQQQPQQPAPSTLSQQAAYPQPQSQQSQQTAYSQQRFPPPQELSQDSFGSQASSAPSMTSSKGGQEDMNLSLQSRPSSLPDLSGSIDDLPMGTEGALSPGVSTSGISSSQGEQSNPAQSPFSPHTSPHLPGIRGPSPSPVGSPASVAQSRSGPLSPAAVPGNQMPPRPPSGQSDSIMHPSMNQSSIAQDRGYMQRNPQMPQYSSPQPGSALSPRQPSGGQIHTGMGSYQQNSMGSYGPQGGQYGPQGGYPRQPNYNALPNANYPSAGMAGGINPMGAGGQMHGQPGIPPYGTLPPGRMSHASMGNRPYGPNMANMPPQVGSGMCPPPGGMNRKTQETAVAMHVAANSIQNRPPGYPNMNQGGMMGTGPPYGQGINSMAGMINPQGPPYSMGGTMANNSAGMAASPEMMGLGDVKLTPATKMNNKADGTPKTESKSKKSSSSTTTNEKITKLYELGGEPERKMWVDRYLAFTEEKAMGMTNLPAVGRKPLDLYRLYVSVKEIGGLTQVNKNKKWRELATNLNVGTSSSAASSLKKQYIQCLYAFECKIERGEDPPPDIFAAADSKKSQPKIQPPSPAGSGSMQGPQTPQSTSSSMAEGGDLKPPTPASTPHSQIPPLPGMSRSNSVGIQDAFNDGSDSTFQKRNSMTPNPGYQPSMNTSDMMGRMSYEPNKDPYGSMRKAPGSDPFMSSGQGPNGGMGDPYSRAAGPGLGNVAMGPRQHYPYGGPYDRVRTEPGIGPEGNMSTGAPQPNLMPSNPDSGMYSPSRYPPQQQQQQQQRHDSYGNQFSTQGTPSGSPFPSQQTTMYQQQQQVSSPAPLPRPMENRTSPSKSPFLHSGMKMQKAGPPVPASHIAPAPVQPPMIRRDITFPPGSVEATQPVLKQRRRLTMKDIGTPEAWRVMMSLKSGLLAESTWALDTINILLYDDNSIMTFNLSQLPGLLELLVEYFRRCLIEIFGILKEYEVGDPGQRTLLDPGRFSKVSSPAPMEGGEEEEELLGPKLEEEEEEEVVENDEEIAFSGKDKPASENSEEKLISKFDKLPVKIVQKNDPFVVDCSDKLGRVQEFDSGLLHWRIGGGDTTEHIQTHFESKTELLPSRPHAPCPPAPRKHVTTAEGTPGTTDQEGPPPDGPPEKRITATMDDMLSTRSSTLTEDGAKSSEAIKESSKFPFGISPAQSHRNIKILEDEPHSKDETPLCTLLDWQDSLAKRCVCVSNTIRSLSFVPGNDFEMSKHPGLLLILGKLILLHHKHPERKQAPLTYEKEEEQDQGVSCNKVEWWWDCLEMLRENTLVTLANISGQLDLSPYPESICLPVLDGLLHWAVCPSAEAQDPFSTLGPNAVLSPQRLVLETLSKLSIQDNNVDLILATPPFSRLEKLYSTMVRFLSDRKNPVCREMAVVLLANLAQGDSLAARAIAVQKGSIGNLLGFLEDSLAATQFQQSQASLLHMQNPPFEPTSVDMMRRAARALLALAKVDENHSEFTLYESRLLDISVSPLMNSLVSQVICDVLFLIGQS

SEQ ID NO: 5755 - protein, 161 aa, Homo sapiens
MNQFGPSALINLSNFSSIKPEPASTPPQGSMANSTAVVKIPGTPGAGGRLSPENNQVLTKKKLQDLVREVDPNEQLDEDVEEMLLQIADDFIESVVTAACQLARHRKSSTLEVKDVQLHLERQWNMWIPGFGSEEIRPYKKACTTEAHKQRMALIRKTTKK

SEQ ID NO: 5756 - protein, 649 aa, Homo sapiens
MSSFGAGKTKEVIFSVEDGSVKMFLRGRPVPMMIPDELAPTYSLDTRSELPSCRLKLEWVYGYRGRDCRANLYLLPTGEIVYFVASVAVLYSVEEQRQRHYLGHNDDIKCLAIHPDMVTIATGQVAGTTKEGKPLPPHVRIWDSVSLSTLHVLGLGVFDRAVCCVGFSKSNGGNLLCAVDESNDHMLSVWDWAKETKVVDVKCSNEAVLVATFHPTDPTVLITCGKSHIYFWTLEGGSLSKRQGLFEKHEKPKYVLCVTFLEGGDVVTGDSGGNLYVWGKGGNRITQAVLGAHDGGVFGLCALRDGTLVSGGGRDRRVVLWGSDYSKLQEVEVPEDFGPVRTVAEGHGDTLYVGTTRNSILQGSVHTGFSLLVQGHVEELWGLATHPSRAQFVTCGQDKLVHLWSSDSHQPLWSRIIEDPARSAGFHPSGSVLAVGTVTGRWLLLDTETHDLVAIHTDGNEQISVVSFSPDGAYLAVGSHDNLVYVYTVDQGGRKVSRLGKCSGHSSFITHLDWAQDSSCFVTNSGDYEILYWDPATCKQITSADAVRNMEWATATCVLGFGVFGIWSEGADGTDINAVARSHDGKLLASADDFGKVHLFSYPCCQPRALSHKYGGHSSHVTNVAFLWDDSMALTTGGKDTSVLQWRVV

SEQ ID NO: 5757 - protein, 267 aa, Homo sapiens
MSGCFPVSGLRCLSRDGRMAAQGAPRFLLTFDFDETIVDENSDDSIVRAAPGQRLPESLRATYREGFYNEYMQRVFKYLGEQGVRPRDLSAIYEAIPLSPGMSDLLQFVAKQGACFEVILISDANTFGVESSLRAAGHHSLFRRILSNPSGPDARGLLALRPFHTHSCARCPANMCKHKVLSDYLRERAHDGVHFERLFYVGDGANDFCPMGLLAGGDVAFPRRGYPMHRLIQEAQKAEPSSFRASVVPWETAADVRLHLQQVLKSC

SEQ ID NO: 5758 - protein, 153 aa, Homo sapiens
MAPAAATGGSTLPSGFSVFTTLPDLLFIFEFIFGGLVWILVASSLVPWPLVQGWVMFVSVFCFVATTTLIILYIIGAHGGETSWVTLDAAYHCTAALFYLSASVLEALATITMQDGFTYRHYHENIAAVVFSYIATLLYVVHAVFSLIRWKSS

SEQ ID NO: 5759 - protein, 111 aa, Homo sapiens
MAPAAATGGSTLPSGFSVFTTLPDLLFIFEFIFGGLVWILVASSLVPWPLVQGWVMFVSVFCFVATTTLIILYIIGAHGGETSWVTLVFSYIATLLYVVHAVFSLIRWKSS

SEQ ID NO: 5760 - protein, 97 aa, Homo sapiens
MAPAAATGGSTLPSGFSVFTTLPDLLFIFEFDAAYHCTAALFYLSASVLEALATITMQDGFTYRHYHENIAAVVFSYIATLLYVVHAVFSLIRWKSS

SEQ ID NO: 5761 - protein, 55 aa, Homo sapiens
MAPAAATGGSTLPSGFSVFTTLPDLLFIFEFVFSYIATLLYVVHAVFSLIRWKSS

SEQ ID NO: 5762 - protein, 729 aa, Homo sapiens
MQSTSNHLWLLSDILGQGATANVFRGRHKKTGDLFAIKVFNNISFLRPVDVQMREFEVLKKLNHKNIVKLFAIEEETTTRHKVLIMEFCPCGSLYTVLEEPSNAYGLPESEFLIVLRDVVGGMNHLRENGIVHRDIKPGNIMRVIGEDGQSVYKLTDFGAARELEDDEQFVSLYGTEEYLHPDMYERAVLRKDHQKKYGATVDLWSIGVTFYHAATGSLPFRPFEGPRRNKEVMYKIITGKPSGAISGVQKAENGPIDWSGDMPVSCSLSRGLQVLLTPVLANILEADQEKCWGFDQFFAETSDILHRMVIHVFSLQQMTAHKIYIHSYNTATIFHELVYKQTKIISSNQELIYEGRRLVLEPGRLAQHFPKTTEENPIFVVSREPLNTIGLIYEKISLPKVHPRYDLDGDASMAKAITGVVCYACRIASTLLLYQELMRKGIRWLIELIKDDYNETVHKKTEVVITLDFCIRNIEKTVKVYEKLMKINLEAAELGEISDIHTKLLRLSSSQGTIETSLQDIDSRLSPGGSLADAWAHQEGTHPKDRNVEKLQVLLNCMTEIYYQFKKDKAERRLAYNEEQIHKFDKQKLYYHATKAMTHFTDECVKKYEAFLNKSEEWIRKMLHLRKQLLSLTNQCFDIEEEVSKYQEYTNELQETLPQKMFTASSGIKHTMTPIYPSSNTLVEMTLGMKKLKEEMEGVVKELAENNHILERFGSLTMDGGLRNVDCL

SEQ ID NO: 5763 - protein, 116 aa, Homo sapiens
MAGVLKKTTGLVGLAVCNTPHERLRILYTKILDVLEEIPKNAAYRKYTEQITNEKLAMVKAEPDVKKLEDQLQGGQLEEVILQAEHELNLARKMREWKLWEPLVEEPPADQWKWPI

SEQ ID NO: 5764 - protein, 261 aa, Homo sapiens
MSYTPGVGGDPTQLAQRISSNIQKITQCSVEIQRTLNQLGTPQDSPELRQQLQQKQQYTNQLAKETDKYIKEFGSLPTTPSEQRQRKIQKDRLVAEFTTSLTNFQKVQRQAAEREKEFVARVRASSRVSGSFPEDSSKERNLVSWESQTQPQVQVQDEEITEDDLRLIHERESSIRQLEADIMDINEIFKDLGMMIHEQGDVIDSIEANVENAEVHVQQANQQLSRAADYQRKSRKTLCIIILILVIGVAIISLIIWGLNH

SEQ ID NO: 5765 - protein, 427 aa, Homo sapiens
MFHLRTCAAKLRPLTASQTVKTFSQNRPAAARTFQQIRCYSAPVAAEPFLSGTSSNYVEEMYCAWLENPKSVHKSWDIFFRNTNAGAPPGTAYQSPLPLSRGSLAAVAHAQSLVEAQPNVDKLVEDHLAVQSLIRAYQIRGHHVAQLDPLGILDADLDSSVPADIISSTDKLGFYGLDESDLDKVFHLPTTTFIGGQESALPLREIIRRLEMAYCQHIGVEFMFINDLEQCQWIRQKFETPGIMQFTNEEKRTLLARLVRSTRFEEFLQRKWSSEKRFGLEGCEVLIPALKTIIDKSSENGVDYVIMGMPHRGRLNVLANVIRKELEQIFCQFDSKLEAADEGSGDVKYHLGMYHRRINRVTDRNITLSLVANPSHLEAADPVVMGKTKAEQFYCGDTEGKKVRPRERRARQIVKAPCSSMEFRSPT

SEQ ID NO: 5766 - protein, 1023 aa, Homo sapiens
MFHLRTCAAKLRPLTASQTVKTFSQNRPAAARTFQQIRCYSAPVAAEPFLSGTSSNYVEEMYCAWLENPKSVHKSWDIFFRNTNAGAPPGTAYQSPLPLSRGSLAAVAHAQSLVEAQPNVDKLVEDHLAVQSLIRAYQIRGHHVAQLDPLGILDADLDSSVPADIISSTDKLGFYGLDESDLDKVFHLPTTTFIGGQESALPLREIIRRLEMAYCQHIGVEFMFINDLEQCQWIRQKFETPGIMQFTNEEKRTLLARLVRSTRFEEFLQRKWSSEKRFGLEGCEVLIPALKTIIDKSSENGVDYVIMGMPHRGRLNVLANVIRKELEQIFCQFDSKLEAADEGSGDVKYHLGMYHRRINRVTDRNITLSLVANPSHLEAADPVVMGKTKAEQFYCGDTEGKKVMSILLHGDAAFAGQGIVYETFHLSDLPSYTTHGTVHVVVNNQIGFTTDPRMARSSPYPTDVARVVNAPIFHVNSDDPEAVMYVCKVAAEWRSTFHKDVVVDLVCYRRNGHNEMDEPMFTQPLMYKQIRKQKPVLQKYAELLVSQGVVNQPEYEEEISKYDKICEEAFARSKDEKILHIKHWLDSPWPGFFTLDGQPRSMSCPSTGLTEDILTHIGNVASSVPVENFTIHGGLSRILKTRGEMVKNRTVDWALAEYMAFGSLLKEGIHIRLSGQDVERGTFSHRHHVLHDQNVDKRTCIPMNHLWPNQAPYTVCNSSLSEYGVLGFELGFAMASPNALVLWEAQFGDFHNTAQCIIDQFICPGQAKWVRQNGIVLLLPHGMEGMGPEHSSARPERFLQMCNDDPDVLPDLKEANFDINQLYDCNWVVVNCSTPGNFFHVLRRQILLPFRKPLIIFTPKSLLRHPEARSSFDEMLPGTHFQRVIPEDGPAAQNPENVKRLLFCTGKVYYDLTRERKARDMVGQVAITRIEQLSPFPFDLLLKEVQKYPNAELAWCQEEHKNQGYYDYVKPRLRTTISRAKPVWYAGRDPAAAPATGNKKTHLTELQRLLDTAFDLDVFKNFS

SEQ ID NO: 5767 - protein, 178 aa, Homo sapiens
MGSQGSGGVPLVQAPYTVLLLPLGTSRQDPGAQSFFLWLRRMQALEREQDALWQGLELLQHGQAWFEDHLREAQRQQLHLGALGENFLTDLHSEPGRPPLAQIQKVNICLQNLIHEKFSPSPLNKASSCTTQDSKERRREQNLWQQQELSRQQKGVTQPKEEMAQRGCTKGPRGPTRV

SEQ ID NO: 5768 - protein, 623 aa, Homo sapiens
MAAGETQLYAKVSNKLKSRSSPSLLEPLLAMGFPVHTALKALAATGRKTAEEALAWLHDHCNDPSLDDPIPQEYALFLCPTGPLLEKLQEFWRESKRQCAKNRAHEVFPHVTLCDFFTCEDQKVECLYEALKRAGDRLLGSFPTAVPLALHSSISYLGFFVSGSPADVIREFAMTFATEASLLADCSVKPCTKQLHLTLAHKFYPHHQRTLEQLARAIPLGHSCQWTAALYSRDMRFVHYQTLRALFQYKPQNVDELTLSPGDYIFVDPTQQDEASEGWVIGISQRTGCRGFLPENYTDRASESDTWVKHRMYTFSLATDLNSRKDGEASSRCSGEFLPQTARSLSSLQALQATVARKSVLVVRHGERVDQIFGKAWLQQCSTPDGKYYRPDLNFPCSLPRRSRGIKDFENDPPLSSCGIFQSRIAGDALLDSGIRISSVFASPALRCVQTAKLILEELKLEKKIKIRVEPGIFEWTKWEAGKTTPTLMSLEELKEANFNIDTDYRPAFPLSALMPAESYQEYMDRCTASMVQIVNTCPQDTGVILIVSHGSTLDSCTRPLLGLPPRECGDFAQLVRKIPSLGMCFCEENKEEGKWELVNPPVKTLTHGANAAFNWRNWISGN

SEQ ID NO: 5769 - protein, 661 aa, Homo sapiens
MAAGETQLYAKVSNKLKSRSSPSLLEPLLAMGFPVHTALKALAATGRKTAEEALAWLHDHCNDPSLDDPIPQEYALFLCPTGPLLEKLQEFWRESKRQCAKNRAHEVFPHVTLCDFFTCEDQKVECLYEALKRAGDRLLGSFPTAVPLALHSSISYLGFFVSGSPADVIREFAMTFATEASLLAGTSVSRFWIFSQVPGHGPNLRLSNLTRASFVSHYILQKYCSVKPCTKQLHLTLAHKFYPHHQRTLEQLARAIPLGHSCQWTAALYSRDMRFVHYQTLRALFQYKPQNVDELTLSPGDYIFVDPTQQDEASEGWVIGISQRTGCRGFLPENYTDRASESDTWVKHRMYTFSLATDLNSRKDGEASSRCSGEFLPQTARSLSSLQALQATVARKSVLVVRHGERVDQIFGKAWLQQCSTPDGKYYRPDLNFPCSLPRRSRGIKDFENDPPLSSCGIFQSRIAGDALLDSGIRISSVFASPALRCVQTAKLILEELKLEKKIKIRVEPGIFEWTKWEAGKTTPTLMSLEELKEANFNIDTDYRPAFPLSALMPAESYQEYMDRCTASMVQIVNTCPQDTGVILIVSHGSTLDSCTRPLLGLPPRECGDFAQLVRKIPSLGMCFCEENKEEGKWELVNPPVKTLTHGANAAFNWRNWISGN

SEQ ID NO: 5770 - protein, 1460 aa, Homo sapiens
MAGRPLRIGDQLVLEEDYDETYIPSEQEILEFAREIGIDPIKEPELMWLAREGIVAPLPGEWKPCQDITGDIYYFNFANGQSMWDHPCDEHYRSLVIQERAKLSTSGAIKKKKKKKEKKDKKDRDPPKSSLALGSSLAPVHVPLGGLAPLRGLVDTPPSALRGSQSVSLGSSVESGRQLGELMLPSQGLKTSAYTKGLLGSIYEDKTALSLLGLGEETNEEDEEESDNQSVHSSSEPLRNLHLDIGALGGDFEYEESLRTSQPEEKKDVSLDSDAAGPPTPCKPSSPGADSSLSSAVGKGRQGSGARPGLPEKEENEKSEPKICRNLVTPKADPTGSEPAKASEKEAPEDTVDAGEEGSRREEAAKEPKKKASALEEGSSDASQELEISEHMKEPQLSDSIASDPKSFHGLDFGFRSRISEHLLDVDVLSPVLGGACRQAQQPLGIEDKDDSQSSQDELQSKQSKGLEERLSPPLPHEERAQSPPRSLATEEEPPQGPEGQPEWKEAEELGEDSAASLSLQLSLQREQAPSPPAACEKGKEQHSQAEELGPGQEEAEDPEEKVAVSPTPPVSPEVRSTEPVAPPEQLSEAALKAMEEAVAQVLEQDQRHLLESKQEKMQQLREKLCQEEEEEILRLHQQKEQSLSSLRERLQKAIEEEEARMREEESQRLSWLRAQVQSSTQADEDQIRAEQEASLQKLREELESQQKAERASLEQKNRQMLEQLKEEIEASEKSEQAALNAAKEKALQQLREQLEGERKEAVATLEKEHSAELERLCSSLEAKHREVVSSLQKKIQEAQQKEEAQLQKCLGQVEHRVHQKSYHVAGYEHELSSLLREKRQEVEGEHERRLDKMKEEHQQVMAKAREQYEAEERKQRAELLGHLTGELERLQRAHERELETVRQEQHKRLEDLRRRHREQERKLQDLELDLETRAKDVKARLALLEVQEETARREKQQLLDVQRQVALKSEEATATHQQLEEAQKEHTHLLQSNQQLREILDELQARKLKLESQVDLLQAQSQQLQKHFSSLEAEAQKKQHLLREVTVEENNASPHFEPDLHIEDLRKSLGTNQTKEVSSSLSQSKEDLYLDSLSSHNVWHLLSAEGVALRSAKEFLVRQTRSMRRRQTALKAAQQHWRHELASAQEVAKDPPGIKALEDMRKNLEKETRHLDEMKSAMRKGHNLLKKKEEKLNQLESSLWEEASDEGTLGGSPTKKAVTFDLSDMDSLSSESSESFSPPHREWWRQQRIDSTPSLTSRKIHGLSHSLRQISSQLSSVLSILDSLNPQSPPPLLASMPAQLPPRDPKSTPTPTYYGSLARFSALSSATPTSTQWAWDSGQGPRLPSSVAQTVDDFLLEKWRKYFPSGIPLLSNSPTPLESRLGYMSASEQLRLLQHSHSQVPEAGSTTFQGIIEANRRWLERVKNDPRLPLFSSTPKPKATLSLLQLGLDEHNRVKVYRF

SEQ ID NO: 5771 - protein, 222 aa, Homo sapiens
MEIPPTNYPASRAALVAQNYINYQQGTPHRVFEVQKVKQASMEDIPGRGHKYRLKFAVEEIIQKQVKVNCTAEVLYPSTGQETAPEVNFTFEGETGKNPDEEDNTFYQRLKSMKEPLEAQNIPDNFGNVSPEMTLVLHLAWVACGYIIWQNSTEDTWYKMVKIQTVKQVQRNDDFIELDYTILLHNIASQEIIPWQMQVLWHPQYGTKVKHNSRLPKEVQLE

SEQ ID NO: 5772 - protein, 113 aa, Homo sapiens
MEDYQAAEETAFVVDEVSNIVKEAIESAIGGNAYQHSKVNQWTTNVVEQTLSQLTKLGKPFKYIVTCVIMQKNGAGLHTASSCFWDSSTDGSCTVRWENKTMYCIVSAFGLSI

SEQ ID NO: 5773 - protein, 779 aa, Homo sapiens
MSRFPAVAGRAPRRQEEGERSRDLQEERLSAVCIADREEKGCTSQEGGTTPTFPIQKQRKKIIQAVRDNSFLIVTGNTGSGKTTQLPKYLYEAGFSQHGMIGVTQPRKVAAISVAQRVAEEMKCTLGSKVGYQVRFDDCSSKETAIKYMTDGCLLKHILGDPNLTKFSVIILDEAHERTLTTDILFGLLKKLFQEKSPNRKEHLKVVVMSATMELAKLSAFFGNCPIFDIPGRLYPVREKFCNLIGPRDRENTAYIQAIVEVTMDIHLNEMAGDILVFLTGQFEIEKSCELLFQMAESVDYDYDVQDTTLDGLLILPCYGSMTTDQQRRIFLPPPPGIRKCVISTNISATSLTIDGIRYVVDGGFVKQLNHNPRLGLDILEVVPISKSEALQRSGRAGRTSSGKCFRIYSKDFWNQCMPDHVIPEIKRTSLTSVVLTLKCLAIHDVIRFPYLDPPNERLILEALKQLYQCDAIDRSGHVTRLGLSMVEFPLPPHLTCAVIKAASLDCEDLLLPIAAMLSVENVFIRPVDPEYQKEAEQRHRELAAKAGGFNDFATLAVIFEQCKSSGAPASWCQKHWIHWRCLFSAFRVEAQLRELIRKLKQQSDFPKETFEGPKHEVLRRCLCAGYFKNVARRSVGRTFCTVDGRGSPVHIHPSSALHEQETKLEWIIFHEVLVTTKVYARIVCPIRYEWVRDLLPKLHEFNAHDLSSVARREVREDARRRWTNKENVKQLKDGISKDVLKKMQRRNDDKSISDARARFLERKQQRTQDHSDTRKETG

SEQ ID NO: 5774 - protein, 433 aa, Homo sapiens
MATSGDCPRSESQGEEPAECSEAGLLQEGVQPEEFVAIADYAATDETQLSFLRGEKILILRQTTADWWWGERAGCCGYIPANHVGKHVDEYDPEDTWQDEEYFGSYGTLKLHLEMLADQPRTTKYHSVILQNKESLTDKVILDVGCGTGIISLFCAHYARPRAVYAVEASEMAQHTGQLVLQNGFADIITVYQQKVEDVVLPEKVDVLVSEWMGTCLLFEFMIESILYARDAWLKEDGVIWPTMAALHLVPCSADKDYRSKVLFWDNAYEFNLSALKSLAVKEFFSKPKYNHILKPEDCLSEPCTILQLDMRTVQISDLETLRGELRFDIRKAGTLHGFTAWFSVHFQSLQEGQPPQVLSTGPFHPTTHWKQTLFMMDDPVPVHTGDVVTGSVVLQRNPVWRRHMSVALSWAVTSRQDPTSQKVGEKVFPIWR

SEQ ID NO: 5775 - protein, 433 aa, Homo sapiens; identical to SEQ ID NO: 5774

SEQ ID NO: 5776 - protein, 450 aa, Homo sapiens
MPSPLGPPCLPVMDPETTLEEPETARLRFRGFCYQEVAGPREALARLRELCCQWLQPEAHSKEQMLEMLVLEQFLGTLPPEIQAWVRGQRPGSPEEAAALVEGLQHDPGQLLGWITAHVLKQEVLPAAQKTEEPLGSPHPSGTVESPGEGPQDTRIEGSVQLSCSVKEEPNVDGQEVAPSSPPLAAQSPEGNHGHQEPASTSFHPPRIQEEWGLLDRSQKELYWDAMLEKYGTVVSLGLPPHQPEAQAQSELGMLLTGTGVCRSLRSGNESEGPPGCPEAQPPQGPGPAAWEGLSGAATPAPTVRPGTPPVPTQPTPAETRLEPAATPRKPYTCEQCGRGFDWKSVFVIHHRTHTSGPGVQSPGLATGESTEKPPQGEVAFPHHPRRSLTGPRSYPCEECGCSFSWKSQLVIHRKSHTGQRRHFCSDCGRAFDWKSQLVIHRKGHRPEVP

SEQ ID NO: 5777 - protein, 745 aa, Homo sapiens
MERPPGLRPGAGGPWEMRERLGTGGFGNVCLYQHRELDLKIAIKSCRLELSTKNRERWCHEIQIMKKLNHANVVKACDVPEELNILIHDVPLLAMEYCSGGDLRKLLNKPENCCGLKESQILSLLSDIGSGIRYLHENKIIHRDLKPENIVLQDVGGKIIHKIIDLGYAKDVDQGSLCTSFVGTLQYLAPELFENKPYTATVDYWSFGTMVFECIAGYRPFLHHLQPFTWHEKIKKKDPKCIFACEEMSGEVRFSSHLPQPNSLCSLVVEPMENWLQLMLNWDPQQRGGPVDLTLKQPRCFVLMDHILNLKIVHILNMTSAKIISFLLPPDESLHSLQSRIERETGINTGSQELLSETGISLDPRKPASQCVLDGVRGCDSYMVYLFDKSKTVYEGPFASRSLSDCVNYIVQDSKIQLPIIQLRKVWAEAVHYVSGLKEDYSRLFQGQRAAMLSLLRYNANLTKMKNTLISASQQLKAKLEFFHKSIQLDLERYSEQMTYGISSEKMLKAWKEMEEKAIHYAEVGVIGYLEDQIMSLHAEIMELQKSPYGRRQGDLMESLEQRAIDLYKQLKHRPSDHSYSDSTEMVKIIVHTVQSQDRVLKELFGHLSKLLGCKQKIIDLLPKVEVALSNIKEADNTVMFMQGKRQKEIWHLLKIACTQSSARSLVGSSLEGAVTPQTSAWLPPTSAEHDHSLSCVVTPQDGETSAQMIEENLNCLGHLSTIIHEANEEQGNSMMNLDWSWLTE

SEQ ID NO: 5778 - protein, 187 aa, Homo sapiens
MTSREHQVSLCNCVPLLRRLLCDAPWRKARPLHALSRYFRSRVSPSKMAEEPQSVLQLPTSIAAGGEGLTDVSPETTTPEPPSSAAVSPGTEEPAGDTKKKIDILLKAVGDTPIMKTKKWAVERTRTIQGLIDFIKKFLKLVASEQLFIYVNQSFAPSPDQEVGTLYECFGSDGKLVLHYCKSQAWG

SEQ ID NO: 5779 - protein, 80 aa, Homo sapiens
MSLRKQTPSDFLKQIIGRPVVVKLNSGVDYRGVLACLDGYMNIALEQTEEYVNGQLKNKYGDAFIRGNNVLYISTQKRRM

SEQ ID NO: 5780 - protein, 340 aa, Homo sapiens [sequence omitted]

SEQ ID NO: 5781 - protein, 412 aa, Homo sapiens
MAAAAGEEEEEEEAARESAARPAAGPALWRLPEELLLLICSYLDMRALGRLAQVCRWLRRFTSCDLLWRRIARASLNSGFTRLGTDLMTSVPVKERVKVSQNWRLGRCREGILLKWRCSQMPWMQLEDDSLYISQANFILAYQFRPDGASLNRRPLGVFAGHDEDVCHFVLANSHIVSAGGDGKIGIHKIHSTFTVKYSAHEQEVNCVDCKGGIIVSGSRDRTAKVWPLASGRLGQCLHTIQTEDRVWSIAISPLLSSFVTGTACCGHFSPLRIWDLNSGQLMTHLGSDFPPGAGVLDVMYESPFTLLSCGYDTYVRYWDLRTSVRKCVMEWEEPHDSTLYCLQTDGNHLLATGSSYYGVVRLWDRRQRACLHAFPLTSTPLSSPVYCLRLTTKHLYAALSYNLHVLDFQNP

SEQ ID NO: 5782 - protein, 1042 aa, Homo sapiens
MDKILEGLVSSSHPLPLKRVIVRKVVESAEHWLDEAQCEAMFDLTTRLILEGQDPFQRQVGHQVLEAYARYHRPEFESFFNKTFVLGLLHQGYHSLDRKDVAILDYIHNGLKLIMSCPSVLDLFSLLQVEVLRMVCERPEPQLCARLSDLLTDFVQCIPKGKLSITFCQQLVRTIGHFQCVSTQERELREYVSQVTKVSNLLQNIWKAEPATLLPSLQEVFASISSTDASFEPSVALASLVQHIPLQMITVLIRSLTTDPNVKDASMTQALCRMIDWLSWPLAQHVDTWVIALLKGLAAVQKFTILIDVTLLKIELVFNRLWFPLVRPGALAVLSHMLLSFQHSPEAFHLIVPHVVNLVHSFKNDGLPSSTAFLVQLTELIHCMMYHYSGFPDLYEPILEAIKDFPKPSEEKIKLILNQSAWTSQSNSLASCLSRLSGKSETGKTGLINLGNTCYMNSVIQALFMATDFRRQVLSLNLNGCNSLMKKLQHLFAFLAHTQREAYAPRIFFEASRPPWFTPRSQQDCSEYLRFLLDRLHEEEKILKVQASHKPSEILECSETSLQEVASKAAVLTETPRTSDGEKTLIEKMFGGKLRTHIRCLNCRSTSQKVEAFTDLSLAFCPSSSLENMSVQDPASSPSIQDGGLMQASVPGPSEEPVVYNPTTAAFICDSLVNEKTIGSPPNEFYCSENTSVPNESNKILVNKDVPQKPGGETTPSVTDLLNYFLAPEILTGDNQYYCENCASLQNAEKTMQITEEPEYLILTLLRFSYDQKYHVRRKILDNVSLPLVLELPVKRITSFSSLSESWSVDVDFTDLSENLAKKLKPSGTDEASCTKLVPYLLSSVVVHSGISSESGHYYSYARNITSTDSSYQMYHQSEALALASSQSHLLGRDSPSAVFEQDLENKEMSKEWFLFNDSRVTFTSFQSVQKITSRFPKDTAYVLLYKKQHSTNGLSGNNPTSGLWINGDPPLQKELMDAITKDNKLYLQEQELNARARALQAASASCSFRPNGFDDNDPPGSCGPTGGGGGGGFNTVGRLVF

SEQ ID NO: 5783 - protein, 1275 aa, Homo sapiens
MSLDFGSVALPVQNEDEEYDEEDYEREKELQQLLTDLPHDMLDDDLSSPELQYSDCSEDGTDGQPHHPEQLEMSWNEQMLPKSQSVNGPSCQGLEPYNKVTYKPYQSSAQNNGSPAQEITGSDTFEGLQQQFLGANENSAENMQIIQLQVLNKAKERQLENLIEKLNESERQIRYLNHQLVIIKDEKDGLTLSLRESQKLFQNGKEREIQLEAQIKALETQIQALKVNEEQMIKKSRTTEMALESLKQQLVDLHHSESLQRAREQHESIVMGLTKKYEEQVLSLQKNLDATVTALKEQEDICSRLKDHVKQLERNQEAIKLEKTEIINKLTRSLEESQKQCAHLLQSGSVQEVAQLQFQLQQAQKAHAMSANMNKALQEELTELKDEISLYESAAKLGIHPSDSEGELNIELTESYVDLGIKKVNWKKSKVTSIVQEEDPNEELSKDEFILKLKAEVQRLLGSNSMKRHLVSQLQNDLKDCHKKIEDLHQVKKDEKSIEVETKTDTSEKPKNQLWPESSTSDVVRDDILLLKNEIQVLQQQNQELKETEGKLRNTNQDLCNQMRQMVQDFDHDKQEAVDRCERTYQQHHEAMKTQIRESLLAKHALEKQQLFEAYERTHLQLRSELDKLNKEVTAVQECYLEVCREKDNLELTLRKTTEKEQQTQEKIKEKLIQQLEKEWQSKLDQTIKAMKKKTLDCGSQTDQVTTSDVISKKEMAIMIEEQKCTIQQNLEQEKDIAIKGAMKKLEIELELKHCENITKQVEIAVQNAHQRWLGELPELAEYQALVKAEQKKWEEQHEVSVNKRISFAVSEAKEKWKSELENMRKNILPGKELEEKIHSLQKELELKNEEVPVVIRAELAKARSEWNKEKQEEIHRIQEQNEQDYRQFLDDHRNKINEVLAAAKEDFMKQKTELLLQKETELQTCLDQSRREWTMQEAKRIQLEIYQYEEDILTVLGVLLSDTQKEHISDSEDKQLLEIMSTCSSKWMSVQYFEKLKGCIQKAFQDTLPLLVENADPEWKKRNMAELSKDSASQGTGQGDPGPAAGHHAQPLALQATEAEADKKKVLEIKDLCCGHCFQELEKAKQECQDLKGKLEKCCRHLQHLERKHKAVVEKIGEENNKVVEELIEENNDMKNKLEELQTLCKTPPRSLSAGAIENACLPCSGGALEELRGQYIKAVKKIKCDMLRYIQESKERAAEMVKAEVLRERQETARKMRKYYLICLQQILQDDGKEGAEKKIMNAASKLATMAKLLETPISSKSQSKTTQSGMSK

SEQ ID NO: 5784 - protein, 288 aa, Homo sapiens
MERPQPDSMPQDLSEALKEATKEVHTQAENAEFMRNFQKGQVTRDGFKLVMASLYHIYVALEEEIERNKESPVFAPVYFPEELHRKAALEQDLAFWYGPRWQEVIPYTPAMQRYVKRLHEVGRTEPELLVAHAYTRYLGDLSGGQVLKKIAQKALDLPSSGEGLAFFTFPNIASATKFKQLYRSRMNSLEMTPAVRQRVIEEAKTAFLLNIQLFEELQELLTHDTKDQSPSRAPGLRQRASNKVQDSAPVETPRGKPPLNTRSQAPLLRWVLTLSFLVATVAVGLYAM

SEQ ID NO: 5785 - protein, 297 aa, Homo sapiens
MTMESREMDCYLRRLKQELMSMKEVGDGLQDQMNCMMGALQELKLLQVQTALEQLEISGGGPVPGSPEGPRTQCEHPCWEGGRGPARPTVCSPSSQPSLGSSTKFPSHRSVCGRDLAPLPRTQPHQSCAQQGPERVEPDDWTSTLMSRGRNRQPLVLGDNVFADLVGNWLDLPELEKGGEKGETGGAREPKGEKGQPQELGRRFALTANIFKKFLRSVRPDRDRLLKEKPGWVTPMVPESRTGRSQKVKKRSLSKGSGHFPFPGTGEHRRGENPPTSCPKALEHSPSGFDINTAVWV

SEQ ID NO: 5786 - protein, 282 aa, Homo sapiens
MRQLMSMKEVGDGLQDQMNCMMGALQELKLLQVQTALEQLEISGGGPVPGSPEGPRTQCEHPCWEGGRGPARPTVCSPSSQPSLGSSTKFPSHRSVCGRDLAPLPRTQPHQSCAQQGPERVEPDDWTSTLMSRGRNRQPLVLGDNVFADLVGNWLDLPELEKGGEKGETGGAREPKGEKGQPQELGRRFALTANIFKKFLRSVRPDRDRLLKEKPGWVTPMVPESRTGRSQKVKKRSLSKGSGHFPFPGTGEHRRGENPPTSCPKALEHSPSGFDINTAVWV

SEQ ID NO: 5787 - protein, 856 aa, Homo sapiens
MRGLGLWLLGAMMLPAIAPSRPWALMEQYEVVLPWRLPGPRVRRALPSHLGLHPERVSYVLGATGHNFTLHLRKNRDLLGSGYTETYTAANGSEVTEQPRGQDHCFYQGHVEGYPDSAASLSTCAGLRGFFQVGSDLHLIEPLDEGGEGGRHAVYQAEHLLQTAGTCGVSDDSLGSLLGPRTAAVFRPRPGDSLPSRETRYVELYVVVDNAEFQMLGSEAAVRHRVLEVVNHVDKLYQKLNFRVVLVGLEIWNSQDRFHVSPDPSVTLENLLTWQARQRTRRHLHDNVQLITGVDFTGTTVGFARVSAMCSHSSGAVNQDHSKNPVGVACTMAHEMGHNLGMDHDENVQGCRCQERFEAGRCIMAGSIGSSFPRMFSDCSQAYLESFLERPQSVCLANAPDLSHLVGGPVCGNLFVERGEQCDCGPPEDCRNRCCNSTTCQLAEGAQCAHGTCCQECKVKPAGELCRPKKDMCDLEEFCDGRHPECPEDAFQENGTPCSGGYCYNGACPTLAQQCQAFWGPGGQAAEESCFSYDILPGCKASRYRADMCGVLQCKGGQQPLGRAICIVDVCHALTTEDGTAYEPVPEGTRCGPEKVCWKGRCQDLHVYRSSNCSAQCHNHGVCNHKQECHCHAGWAPPHCAKLLTEVHAASGSLPVFVVVVLVLLAVVLVTLAGIIVYRKARSRILSRNVAPKTTMGRSNPLFHQAASRVPAKGGAPAPSRGPQELVPTTHPGQPARHPASSVALKRPPPAPPVTVSSPPFPVPVYTRQAPKQVIKPTFAPPVPPVKPGAGAANPGPAEGAVGPKVALKPPIQRKQGAELPQHPRGAPAPVWKFGEVAAEKPCVPAFHGPASAAQP

SEQ ID NO: 5788 - protein, 185 aa, Homo sapiens
MTTPNKTPPGADPKQLERTGTVREIGSQAVWSLSSCKPGFGVDQLRDDNLETYWQSDGSQPHLVNIQFRRKTTVKTLCIYADYKSDESYTPSKISVRVGNNFHNLQEIRQLELVEPSGWIHVPLTDNHKKPTRSFMIQIAVLANHLNGRDTHMRQIKIYTPVEESSIGKFPRCTTIDFMMYRSIR

SEQ ID NO: 5789 - protein, 233 aa, Homo sapiens
MVSMSFKRNRSDRFYSTRCCGCCHVRTGTIILGTWYMVVNLLMAILLTVEVTHPNSMPAVNIQYEVIGNYYSSERMADNACVLFAVSVLMFIISSMLVYGAISYQVGWLIPFFCYRLFDFVLSCLVAISSLTYLPRIKEYLDQLPDFPYKDDLLALDSSCLLFIVLVFFALFIIFKAYLINCVWNCYKYINNRNVPEIAVYPAFEAPPQYVLPTYEMAVKMPEKEPPPPYLPA

SEQ ID NO: 5790 - protein, 680 aa, Homo sapiens
MESSSSSNSYFSVGPTSPSAVVLLYSKELKKWDEFEDILEERRHVSDLKFAMKCYTPLVYKGITPCKPIDIKCSVLNSEEIHYVIKQLSKESLQSVDVLREEVSEILDEMSHKLRLGAIRFCAFTLSKVFKQIFSKVCVNEEGIQKLQRAIQEHPVVLLPSHRSYIDFLMLSFLLYNYDLPVPVIAAGMDFLGMKMVGELLRMSGAFFMRRTFGGNKLYWAVFSEYVKTMLRNGYAPVEFFLEGTRSRSAKTLTPKFGLLNIVMEPFFKREVFDTYLVPISISYDKILEETLYVYELLGVPKPKESTTGLLKARKILSENFGSIHVYFGDPVSLRSLAAGRMSRSSYNLVPRYIPQKQSEDMHAFVTEVAYKMELLQIENMVLSPWTLIVAVLLQNRPSMDFDALVEKTLWLKGLTQAFGGFLIWPDNKPAEEVVPASILLHSNIASLVKDQVILKVDSGDSEVVDGLMLQHITLLMCSAYRNQLLNIFVRPSLVAVALQMTPGFRKEDVYSCFRFLRDVFADEFIFLPGNTLKDFEEGCYLLCKSEAIQVTTKDILVTEKGNTVLEFLVGLFKPFVESYQIICKYLLSEEEDHFSEEQYLAAVRKFTSQLLDQGTSQCYDVLSSDVQKNALAACVRLGVVEKKKINNNCIFNVNEPATTKLEEMLGCKTPIGKPATAKL

SEQ ID NO: 5791 - protein, 1357 aa, Homo sapiens
MEFYESAYFIVLIPSIVITVIFLFFWLFMKETLYDEVLAKQKREQKLIPTKTDKKKAEKKKNKKKEIQNGNLHESDSESVPRDFKLSDALAVEDDQVAPVPLNVVETSSSVRERKKKEKKQKPVLEEQVIKESDASKIPGKKVEPVPVTKQPTPPSEAAASKKKPGQKKSKNGSDDQDKKVETLMVPSKRQEALPLHQETKQESGSGKKKASSKKQKTENVFVDEPLIHATTYIPLMDNADSSPVVDKREVIDLLKPDQVEGIQKSGTKKLKTETDKENAEVKFKDFLLSLKTMMFSEDEALCVVDLLKEKSGVIQDALKKSSKGELTTLIHQLQEKDKLLAAVKEDAAATKDRCKQLTQEMMTEKERSNVVITRMKDRIGTLEKEHNVFQNKIHVSYQETQQMQMKFQQVREQMEAEIAHLKQENGILRDAVSNTTNQLESKQSAELNKLRQDYARLVNELTEKTGKLQQEEVQKKNAEQAATQLKVQLQEAERRWEEVQSYIRKRTAEHEAAQQDLQSKFVAKENEVQSLHSKLTDTLVSKQQLEQRLMQLMESEQKRVNKEESLQMQVQDILEQNEALKAQIQQFHSQIAAQTSASVLAEELHKVIAEKDKQIKQTEDSLASERDRLTSKEEELKDIQNMNFLLKAEVQKLQALANEQAAAAHELEKMQQSVYVKDDKIRLLEEQLQHEISNKMEEFKILNDQNKALKSEVQKLQTLVSEQPNKDVVEQMEKCIQEKDEKLKTVEELLETGLIQVATKEEELNAIRTENSSLTKEVQDLKAKQNDQVSFASLVEELKKVIHEKDGKIKSVEELLEAELLKVANKEKTVQDLKQEIKALKEEIGNVQLEKAQQLSITSKVQELQNLLKGKEEQMNTMKAVLEEKEKDLANTGKWLQDLQEENESLKAHVQEVAQHNLKEASSASQFEELEIVLKEKENELKRLEAMLKERESDLSSKTQLLQDVQDENKLFKSQIEQLKQQNYQQASSFPPHEELLKVISEREKEISGLWNELDSLKDAVEHQRKKNNDLREKNWEAMEALASTEKMLQDKVNKTSKERQQQVEAVELEAKEVLKKLFPKVSVPSNLSYGEWLHGFEKKAKECMAGTSGSEEVKVLEHKLKEADEMHTLLQLECEKYKSVLAETEGILQKLQRSVEQEENKWKVKVDESHKTIKQMQSSFTSSEQELERLRSENKDIENLRREREHLEMELEKAEMERSTYVTEVRELKDLLTELQKKLDDSYSEAVRQNEELNLLKAQLNETLTKLRTEQNERQKVAGDLHKAQQSLELIQSKIVKAAGDTTVIENSDVSPETESSEKETMSVSLNQTVTQLQQLLQAVNQQLTKEKEHYQVLE

SEQ ID NO: 5792 - protein, 287 aa, Homo sapiens
MAKHEQILVLDPPTDLKFKGPFTDVVTTNLKLRNPSDRKVCFKVKTTAPRRYCVRPNSGIIDPGSTVTVSVMLQPFDYDPNEKSKHKFMVQTIFAPPNTSDMEAVWKEAKPDELMDSKLRCVFEMPNENDKLGITPPGNAPTVTSMSSINNTVATPASYHTKDDPRGLSVLKQEKQKNDMEPSKAVPLNASKQDGPMPKPHSVSLNDTETRKLMEECKRLQGEMMKLSEENRHLRDEGLRLRKVAHSDKPGSTSTASFRDNVTSPLPSLLVVIAAIFIGFFLGKFIL

SEQ ID NO: 5793 - protein, 242 aa, Homo sapiens
MAKHEQILVLDPPTDLKFKGPFTDVVTTNLKLRNPSDRKVCFKVKTTAPRRYCVRPNSGIIDPGSTVTVSVMLQPFDYDPNEKSKHKFMVQTIFAPPNTSDMEAVWKEAKPDELMDSKLRCVFEMPNENDKLNDMEPSKAVPLNASKQDGPMPKPHSVSLNDTETRKLMEECKRLQGEMMKLSEENRHLRDEGLRLRKVAHSDKPGSTSTASFRDNVTSPLPSLLVVIAAIFIGFFLGKFIL

SEQ ID NO: 5794 - protein, 450 aa, Homo sapiens
MSAIQAAWPSGTECIAKYNFHGTAEQDLPFCKGDVLTIVAVTKDPNWYKAKNKVGREGIIPANYVQKREGVKAGTKLSLMPWFHGKITREQAERLLYPPETGLFLVRESTNYPGDYTLCVSCDGKVEHYRIMYHASKLSIDEEVYFENLMQLVEHYTSDADGLCTRLIKPKVMEGTVAAQDEFYRSGWALNMKELKLLQTIGKGEFGDVMLGDYRGNKVAVKCIKNDATAQAFLAEASVMTQLRHSNLVQLLGVIVEEKGGLYIVTEYMAKGSLVDYLRSRGRSVLGGDCLLKFSLDVCEAMEYLEGNNFVHRDLAARNVLVSEDNVAKVSDFGLTKEASSTQDTGKLPVKWTAPEALREKKFSTKSDVWSFGILLWEIYSFGRVPYPRIPLKDVVPRVEKGYKMDAPDGCPPAVYEVMKNCWHLDAAMRPSFLQLREQLEHIKTHELHL

SEQ ID NO: 5795 - protein, 347 aa, Homo sapiens
MAQSRDGGNPFAEPSELDNPFQDPAVIQHRPSRQYATLDVYNPFETREPPPAYEPPAPAPLPPPSAPSLQPSRKLSPTEPKNYGSYSTQASAAAATAELLKKQEELNRKAEELDRRERELQHAALGGTATRQNNWPPLPSFCPVQPCFFQDISMEIPQEFQKTVSTMYYLWMCSTLALLLNFLACLASFCVETNNGAGFGLSILWVLLFTPCSFVCWYRPMYKAFRSDSSFNFFVFFFIFFVQDVLFVLQAIGIPGWGFSGWISALVVPKGNTAVSVLMLLVALLFTGIAVLGIVMLKRIHSLYRRTGASFQKAQQEFAAGVFSNPAVRTAAANAAAGAAENAFRAP

SEQ ID NO: 5796 - protein, 321 aa, Homo sapiens
MAQSRDGGNPFAEPSELDNPFQPPPAYEPPAPAPLPPPSAPSLQPSRKLSPTEPKNYGSYSTQASAAAATAELLKKQEELNRKAEELDRRERELQHAALGGTATRQNNWPPLPSFCPVQPCFFQDISMEIPQEFQKTVSTMYYLWMCSTLALLLNFLACLASFCVETNNGAGFGLSILWVLLFTPCSFVCWYRPMYKAFRSDSSFNFFVFFFIFFVQDVLFVLQAIGIPGWGFSGWISALVVPKGNTAVSVLMLLVALLFTGIAVLGIVMLKRIHSLYRRTGASFQKAQQEFAAGVFSNPAVRTAAANAAAGAAENAFRAP

SEQ ID NO: 5797 - protein, 433 aa, Homo sapiens
MPDYLGADQRKTKEDEKDDKPIRALDEGDIALLKTYGQSTYSRQIKQVEDDIQQLLKKINELTGIKESDTGLAPPALWDLAADKQTLQSEQPLQVARCTKIINADSEDPKYIINVKQFAKFVVDLSDQVAPTDIEEGMRVGVDRNKYQIHIPLPPKIDPTVTMMQVEEKPDVTYSDVGGCKEQIEKLREVVETPLLHPERFVNLGIEPPKGVLLFGPPGTGKTLCARAVANRTDACFIRVIGSELVQKYVGEGARMVRELFEMARTKKACLIFFDEIDAIGGARFDDGAGGDNEVQRTMLELINQLDGFDPRGNIKVLMATNRPDTLDPALMRPGRLDRKIEFSLPDLEGRTHIFKIHARSMSVERDIRFELLARLCPNSTGAEIRSVCTEAGMFAIRARRKIATEKDFLEAVNKVIKSYAKFSATPRYMTYN

SEQ ID NO: 5798 - protein, 1039 aa, Homo sapiens
MQSRLLLLGAPGGHGGPASRRMRLLLRQVVQRRPGGDRQRPEVRLLHAGSGADTGDTVNIGDVSYKLKIPKNPELVPQNYISDSLAQSVVQHLRWIMQKDLLGQDVFLIGPPGPLRRSIAMQYLELTKREVEYIALSRDTTETDLKQRREIRAGTAFYIDQCAVRAATEGRTLILEGLEKAERNVLPVLNNLLENREMQLEDGRFLMSAERYDKLLRDHTKKELDSWKIVRVSENFRVIALGLPVPRYSGNPLDPPLRSRFQARDIYYLPFKDQLKLLYSIGANVSAEKVSQLLSFATTLCSQESSTLGLPDFPLDSLAAAVQILDSFPMMPIKHAIQWLYPYSILLGHEGKMAVEGVLKRFELQDSGSSLLPKEIVKVEKMMENHVSQASVTIRIADKEVTIKVPAGTRLLSQPCASDRFIQTLSHKQLQAEMMQSHMVKDICLIGGKGCGKTVIAKNFADTLGYNIEPIMLYQDMTARDLLQQRYTLPNGDTAWRSSPLVNAALEGKLVLLDGIHRVNAGTLAVLQRLIHDRELSLYDGSRLLREDRYMRLKEELQLSDEQLQKRSIFPIHPSFRIIALAEPPVIGSTAHQWLGPEFLTMFFFHYMKPLVKSEEIQVIKEKVPNVPQEALDKLLSFTHKLRETQDPTAQSLAASLSTRQLLRISRRLSQYPNENLHSAVTKACLSRFLPSLARSALEKNLADATIEINTDDNLEPELKDYKCEVTSGTLRIGAVSAPIYNAHEKMKVPDVLFYDNIQHVIVMEDMLKDFLLGEHLLLVGNQGVGKNKIVDRFLHLLNRPREYIQLHRDTTVQTLTLQPSVKDGLIVYEDSPLVKAVKLGHILVVDEADKAPTNVTCILKTLVENGEMILADGRRIVANSANVNGRENVVVIHPDFRMIVLANRPGFPFLGNDFFGTLGDIFSCHAVDNPKPHSELEMLRQYGPNVPEPILQKLVAAFGELRSLADQGIINYPYSTREVVNIVKHLQKFPTEGLSSVVRNVFDFDSYNNDMREILINTLHKYGIPIGAKPTSVQLAKE

SEQ ID NO: 5799 - protein, 1905 aa, Homo sapiens
MQSRLLLLGAPGGHGGPASRRMRLLLRQVVQRRPGGDRQRPEVRLLHAGSGADTGDTVNIGDVSYKLKIPKNPELVPQNYISDSLAQSVVQHLRWIMQKDLLGQDVFLIGPPGPLRRSIAMQYLELTKREVEYIALSRDTTETDLKQRREIRAGTAFYIDQCAVRAATEGRTLILEGLEKAERNVLPVLNNLLENREMQLEDGRFLMSAERYDKLLRDHTKKELDSWKIVRVSENFRVIALGLPVPRYSGNPLDPPLRSRFQARDIYYLPFKDQLKLLYSIGANVSAEKVSQLLSFATTLCSQESSTLGLPDFPLDSLAAAVQILDSFPMMPIKHAIQWLYPYSILLGHEGKMAVEGVLKRFELQDSGSSLLPKEIVKVEKMMENHVSQASVTIRIADKEVTIKVPAGTRLLSQPCASDRFIQTLSHKQLQAEMMQSHMVKDICLIGGKGCGKTVIAKNFADTLGYNIEPIMLYQDMTARDLLQQRYTLPNGDTAWRSSPLVNAALEGKLVLLDGIHRVNAGTLAVLQRLIHDRELSLYDGSRLLREDRYMRLKEELQLSDEQLQKRSIFPIHPSFRIIALAEPPVIGSTAHQWLGPEFLTMFFFHYMKPLVKSEEIQVIKEKVPNVPQEALDKLLSFTHKLRETQDPTAQSLAASLSTRQLLRISRRLSQYPNENLHSAVTKACLSRFLPSLARSALEKNLADATIEINTDDNLEPELKDYKCEVTSGTLRIGAVSAPIYNAHEKMKVPDVLFYDNIQHVIVMEDMLKDFLLGEHLLLVGNQGVGKNKIVDRFLHLLNRPREYIQLHRDTTVQTLTLQPSVKDGLIVYEDSPLVKAVKLGHILVVDEADKAPTNVTCILKTLVENGEMILADGRRIVANSANVNGRENVVVIHPDFRMIVLANRPGFPFLGNDFFGTLGDIFSCHAVDNPKPHSELEMLRQYGPNVPEPILQKLVAAFGELRSLADQGIINYPYSTREVVNIVKHLQKFPTEGLSSVVRNVFDFDSYNNDMREILINTLHKYGIPIGAKPTSVQLAKELTLPEQTFMGYWTIGQARSGMQKLLCPVETHHIDIKGPALINIQEYPIERHEERSLNFTEECASWRIPLDEINIICDIATSHENEQNTLYVVTCNPASLYFMNMTGKSGFFVDFFDIFPRTANGVWHPFVTVAPLGSPLKGQVVLHEQQSNVILLLDTTGRALHRLILPSEKFTSKKPFWWNKEEAETYKMCKEFSHKNWLVFYKEKGNSLTVLDVLEGRTHTISLPINLKTVFLVAEDKWLLVESKTNQKYLLTKPAHIESEGSGVCQLYVLKEEPPSTGFGVTQETEFSIPHKISSDQLSSEHLSSAVEQKIASPNRILSDEKNYATIVVGFPDLMSPSEVYSWKRPSSLHKRSGTDTSFYRGKKKRGTPKQSNCVTLLDTNQVVRILPPGEVPLKDIYPKDVTPPQTSGYIEVTDLQSKKLRYIPIPRSESLSPYTTWLSTISDTDALLAEWDKSGVVTVDMGGHIRLWETGLERLQRSLMEWRNMIGQDDRNMQITINRDSGEDVSSPKHGKEDPDNMPHVGGNTWAGGTGGRDTAGLGGKGGPYRLDAGHTVYQVSQAEKDAVPEEVKRAAREMGQRAFQQRLKEIQMSEYDAATYERFSGAVRRQVHSLRIILDNLQAKGKERQWLRHQATGELDDAKIIDGLTGEKAIYKRRGELEPQLGSPQQKPKRLRLVVDVSGSMYRFNRMDGRLERTMEAVCMVMEAFENYEEKFQYDIVGHSGDGYNIGLVPMNKIPKDNKQRLEILKTMHAHSQFCMSGDHTLEGTEHAIKEIVKEEADEYFVIVLSDANLSRYGIHPAKFAQILTRDPQVNAFAIFIGSLGDQATRLQRTLPAGRSFVAMDTKDIPQILQQIFTSTMLSSV

SEQ ID NO: 5800 - protein, 1098 aa, Homo sapiens
MGSKERFHWQSHNVKQSGVDDMVLLPQITEDAIAANLRKRFMDDYIFTYIGSVLISVNPFKQMPYFTDREIDLYQGAAQYENPPHIYALTDNMYRNMLIDCENQCVIISGESGAGKTVAAKYIMGYISKVSGGGEKVQHVKDIILQSNPLLEAFGNAKTVRNNNSSRFGKYFEIQFSRGGEPDGGKISNFLLEKSRVVMQNENERNFHIYYQLLEGASQEQRQNLGLMTPDYYYYLNQSDTYQVDGTDDRSDFGETLSAMQVIGIPPSIQQLVLQLVAGILHLGNISFCEDGNYARVESVDLLAFPAYLLGIDSGRLQEKLTSRKMDSRWGGRSESINVTLNVEQAAYTRDALAKGLYARLFDFLVEAINRAMQKPQEEYSIGVLDIYGFEIFQKNGFEQFCINFVNEKLQQIFIELTLKAEQEEYVQEGIRWTPIQYFNNKVVCDLIENKLSPPGIMSVLDDVCATMHATGGGADQTLLQKLQAAVGTHEHFNSWSAGFVIHHYAGKVSYDVSGFCERNRDVLFSDLIELMQTSEQAFLRMLFPEKLDGDKKGRPSTAGSKIKKQANDLVATLMRCTPHYIRCIKPNETKRPRDWEENRVKHQVEYLGLKENIRVRRAGFAYRRQFAKFLQRYAILTPETWPRWRGDERQGVQHLLRAVNMEPDQYQMGSTKVFVKNPESLFLLEEVRERKFDGFARTIQKAWRRHVAVRKYEEMREEASNILLNKKERRRNSINRNFVGDYLGLEERPELRQFLGKRERVDFADSVTKYDRRFKPIKRDLILTPKCVYVIGREKVKKGPEKGQVCEVLKKKVDIQALRGVSLSTRQDDFFILQEDAADSFLESVFKTEFVSLLCKRFEEATRRPLPLTFSDTLQFRVKKEGWGGGGTRSVTFSRGFGDLAVLKVGGRTLTVSVGDGLPKSSKPTRKGMAKGKPRRSSQAPTRAAPAPPRGMDRNGVPPSARGGPLPLEIMSGGGTHRPPRGPPSTSLGASRRPRARPPSEHNTEFLNVPDQGMAGMQRKRSVGQRPVPGVGRPKPQPRTHGPRCRALYQYVGQDVDELSFNVNEVIEILMEDPSGWWKGRLHGQEGLFPGNYVEKI

SEQ ID NO: 5801 - protein, 689 aa, Homo sapiens
MIEMAAEKEPFLVPAPPPPLKDESGGGGGPTVPPHQEAASGELRGGTERGPGRCAPSAGSPAAAVGRESPGAAATSSSGPQAQQHRGGGPQAQSHGEARLSDPPGRAAPPDVGEERRGGGGTELGPPAPPRPRNGYQPHRPPGGGGGKRRNSCNVGGGGGGFKHPAFKRRRRVNSDCDSVLPSNFLLGGNIFDPLNLNSLLDEEVSRTLNAETPKSSPLPAKGRDPVEILIPKDITDPLSLNTCTDEGHVVLASPLKTGRKRHRHRGQHHQQQQAAGGSESHPVPPTAPLTPLLHGEGASQQPRHRGQNRDAPQPYELNTAINCRDEVVSPLPSALQGPSGSLSAPPAASVISAPPSSSSRHRKRRRTSSKSEAGARGGGQGSKEKGRGSWGGRHHHHHPLPAAGFKKQQRKFQYGNYCKYYGYRNPSCEDGRLRVLKPEWFRGRDVLDLGCNVGHLTLSIACKWGPSRMVGLDIDSRLIHSARQNIRHYLSEELRLPPQTLEGDPGAEGEEGTTTVRKRSCFPASLTASRGPIAAPQVPLDGADTSVFPNNVVFVTGNYVLDRDDLVEAQTPEYDVVLCLSLTKWVHLNWGDEGLKRMFRRIYRHLRPGGILVLEPQPWSSYGKRKTLTETIYKNYYRIQLKPEQFSSYLTSPDVGFSSYELVATPHNTSKGFQRPVYLFHKARSPSH

SEQ ID NO: 5802 - protein, 192 aa, Homo sapiens
MGKGCKVVVCGLLSVGKTAILEQLLYGNHTIGMEDCETMEDVYMASVETDRGVKEQLHLYDTRGLQEGVELPKHYFSFADGFVLVYSVNNLESFQRVELLKKEIDKFKDKKEVAIVVLGNKIDLSEQRQVDAEVAQQWAKSEKVRLWEVTVTDRKTLIEPFTLLASKLSQPQSKSSFPLPGRKNKGNSNSEN

SEQ ID NO: 5803 - protein, 1843 aa, Homo sapiens
MENEIFTPLLEQFMTSPLVTWVKTFGPLAAGNGTNLDEYVALVDGVFLNQVMLQINPKLESQRVNKKVNNDASLRMHNLSILVRQIKFYYQETLQQLIMMSLPNVLIIGKNPFSEQGTEEVKKLLLLLLGCAVQCQKKEEFIERIQGLDFDTKAAVAAHIQEVTHNQENVFDLQWMEVTDMSQEDIEPLLKNMALHLKRLIDERDEHSETIIELSEERDGLHFLPHASSSAQSPCGSPGMKRTESRQHLSVELADAKAKIRRLRQELEEKTEQLLDCKQELEQMEIELKRLQQENMNLLSDARSARMYRDELDALREKAVRVDKLESEVSRYKERLHDIEFYKARVEELKEDNQVLLETKTMLEDQLEGTRARSDKLHELEKENLQLKAKLHDMEMERDMDRKKIEELMEENMTLEMAQKQSMDESLHLGWELEQISRTSELSEAPQKSLGHEVNELTSSRLLKLEMENQSLTKTVEELRTTVDSVEGNASKILKMEKENQRLSKKVEILENEIVQEKQSLQNCQNLSKDLMKEKAQLEKTIETLRENSERQIKILEQENEHLNQTVSSLRQRSQISAEARVKDIEKENKILHESIKETSSKLSKIEFEKRQIKKELEHYKEKGERAEELENELHHLEKENELLQKKITNLKITCEKIEALEQENSELERENRKLKKTLDSFKNLTFQLESLEKENSQLDEENLELRRNVESLKCASMKMAQLQLENKELESEKEQLKKGLELLKASFKKTERLEVSYQGLDIENQRLQKTLENSNKKIQQLESELQDLEMENQTLQKNLEELKISSKRLEQLEKENKSLEQETSQLEKDKKQLEKENKRLRQQAEIKDTTLEENNVKIGNLEKENKTLSKEIGIYKESCVRLKELEKENKELVKRATIDIKTLVTLREDLVSEKLKTQQMNNDLEKLTHELEKIGLNKERLLHDEQSTDDSRYKLLESKLESTLKKSLEIKEEKIAALEARLEESTNYNQQLRQELKTVKKNYEALKQRQDEERMVQSSPPISGEDNKWERESQETTRELLKVKDRLIEVERNNATLQAEKQALKTQLKQLETQNNNLQAQILALQRQTVSLQEQNTTLQTQNAKLQVENSTLNSQSTSLMNQNAQLLIQQSSLENENESVIKEREDLKSLYDSLIKDHEKLELLHERQASEYESLISKHGTLKSAHKNLEVEHRDLEDRYNQLLKQKGQLEDLEKMLKVEQEKMLLENKNHETVAAEYKKLCGENDRLNHTYSQLLKETEVLQTDHKNLKSLLNNSKLEQTRLEAEFSKLKEQYQQLDITSTKLNNQCELLSQLKGNLEEENRHLLDQIQTLMLQNRTLLEQNMESKDLFHVEQRQYIDKLNELRRQKEKLEEKIMDQYKFYDPSPPRRRGNWITLKMRKLIKSKKDINRERQKSLTLTPTRSDSSEGFLQLPHQDSQDSSSVGSNSLEDGQTLGTKKSSTMNDLVQSMVLAGQWTGSTENLEVPDDISTGKRRKELGAMAFSTTAINFSTVNSSAGFRSKQLVNNKDTTSFEDISPQGVSDDSSTGSRVHASRPASLDSGRTSTSNSNNNASLHEVKAGAVNNQSRPQSHSSGEFSLLHDHEAWSSSGSSPIQYLKRQTRSSPVLQHKISETLESRHHKIKTGSPGSEVVTLQQFLEESNKLTSVQIKSSSQENLLDEVMKSLSVSSDFLGKDKPVSCGLARSVSGKTPGDFYDRRTTKPEFLRPGPRKTEDTYFISSAGKPTPGTQGKIKLVKESSLSRQSKDSNPYATLPRASSVISTAEGTTRRTSIHDFLTKDSRLPISVDSPPAAADSNTTAASNVDKVQESRNSKSRSREQQSS

SEQ ID NO: 5804 - protein, 280 aa, Homo sapiens
MAPSGSLAVPLAVMVPLLWGAPWTHGRRSNVRVITDENWRELLEGDWMIEFYAPWCPACQNLQPEWESFAEWGEDLEVNIAKVDVTEQPGLSGRFIINALPTIYHCKDGEFRRYQGPRTKKDFINFISDKEWKSIEPVSSWFGPGSVLMSSMSALFQLSMWIRTCHNYFIEDLGLPVWGSYTVFALATLFSGLLLGLCMIFVADCLCPSKRRRPQPYPYPSKKLLSESAQPLKKVEEEQEADEEDVSEEEAESKEGTNKDFPQNAIRQRSLGPSLATDKS

SEQ ID NO: 5805 - protein, 474 aa, Homo sapiens
MATNWGSLLQDKQQLEELARQAVDRALAEGVLLRTSQEPTSSEVVSYAPFTLFPSLVPSALLEQAYAVQMDFNLLVDAVSQNAAFLEQTLSSTIKQDDFTARLFDIHKQVLKEGIAQTVFLGLNRSDYMFQRSADGSPALKQIEINTISASFGGLASRTPAVHRHVLSVLSKTKEAGKILSNNPSKGLALGIAKAWELYGSPNALVLLIAQEKERNIFDQRAIENELLARNIHVIRRTFEDISEKGSLDQDRRLFVDGQEIAVVYFRDGYMPRQYSLQNWEARLLLERSHAAKCPDIATQLAGTKKVQQELSRPGMLEMLLPGQPEAVARLRATFAGLYSLDVGEEGDQAIAEALAAPSRFVLKPQREGGGNNLYGEEMVQALKQLKDSEERASYILMEKIEPEPFENCLLRPGSPARVVQCISELGIFGVYVRQEKTLVMNKHVGHLLRTKAIEHADGGVAAGVAVLDNPYPV

SEQ ID NO: 5806 - protein, 500 aa, Homo sapiens
MEAEDIQEELTCPICLDYFQDPVSIECGHNFCRGCLHRNWAPGGGPFPCPECRHPSAPAALRPNWALARLTEKTQRRRLGPVPPGLCGRHWEPLRLFCEDDQRPVCLVCRESQEHQTHAMAPIDEAFESYRTGNFDIHVDEWKRRLIRLLLYHSKQEEKLLKSQRNLVAKMKKVMHLQDVEVKNATQWKDKIKSQRMRISTEFSKLHNFLVEEEDLFLQRLNKEEEETKKKLNENTLKLNQTIASLKKLILEVGEKSQAPTLELLQNPKEVLTRSEIQDVNYSLEAVKVKTVCQIPLMKEMLKRFQVAVNLAEDTAHPKLVFSQEGRYVKNTASASSWPVFSSAWNYFAGWRNPQKTAFVERFQHLPCVLGKNVFTSGKHYWEVESRDSLEVAVGVCREDVMGITDRSKMSPDVGIWAIYWSAAGYWPLIGFPGTPTQQEPALHRVGVYLDRGTGNVSFYSAVDGVHLHTFSCSSVSRLRPFFWLSPLASLVIPPVTDRK

SEQ ID NO: 5807 - protein, 474 aa, Homo sapiens
MEAEDIQEELTCPICLDYFQDPVSIECGHNFCRGCLHRNWAPGGGPFPCPECRHPSAPAALRPNWALARLTEKTQRRRLGPVPPGLCGRHWEPLRLFCEDDQRPVCLVCRESQEHQTHAMAPIDEAFESYREKLLKSQRNLVAKMKKVMHLQDVEVKNATQWKDKIKSQRMRISTEFSKLHNFLVEEEDLFLQRLNKEEEETKKKLNENTLKLNQTIASLKKLILEVGEKSQAPTLELLQNPKEVLTRSEIQDVNYSLEAVKVKTVCQIPLMKEMLKRFQVAVNLAEDTAHPKLVFSQEGRYVKNTASASSWPVFSSAWNYFAGWRNPQKTAFVERFQHLPCVLGKNVFTSGKHYWEVESRDSLEVAVGVCREDVMGITDRSKMSPDVGIWAIYWSAAGYWPLIGFPGTPTQQEPALHRVGVYLDRGTGNVSFYSAVDGVHLHTFSCSSVSRLRPFFWLSPLASLVIPPVTDRK

SEQ ID NO: 5808 - protein, 252 aa, Homo sapiens
MSAAVACVDYFAADVLMAISSGAVVHRGRPGPEGAGPAAGLDVRAARREAASPGTPGPPPPPPAASGPGPGAAAAPHLLAASILADLRGGPGAAPGGASPASSSSAASSPSSGRAPGAAPSAAAKSHRCPFPDCAKAYYKSSHLKSHLRTHTGERPFACDWQGCDKKFARSDELARHHRTHTGEKRFSCPLCSKRFTRSDHLAKHARRHPGFHPDLLRRPGARSTSPSDSLPCSLAGSPAPSPAPSPAPAGL

SEQ ID NO: 5809 - protein, 286 aa, Homo sapiens
MAMEGYRRFLALLGSALLVGFLSVIFALVWVLHYREGLGWDGSALEFNWHPVLMVTGFVFIQGIAIIVYRLPWTWKCSKLLMKSIHAGLNAVAAILAIISVVAVFENHNVNNIANMYSLHSWVGLIAVICYLLQLLSGFSVFLLPWAPLSLRAFLMPIHVYSGIVIFGTVIATALMGLTEKLIFSLRDPAYSTFPPEGVFVNTLGLLILVFGALIFWIVTRPQWKRPKEPNSTILHPNGGTEQGARGSMPAYSGNNMDKSDSELNNEVAARKRNLALDEAGQRSTM

SEQ ID NO: 5810 - protein, 1386 aa, Homo sapiens
MLRYLLKTLLQMNLFADSLAGDISNSSELLLGFNSSLAALNHTLLPPGDPSLNGSRVGPEDAMPRIVEQPPDLLVSRGEPATLPCRAEGRPRPNIEWYKNGARVATVREDPRAHRLLLPSGALFFPRIVHGRRARPDEGVYTCVARNYLGAAASRNASLEVAVLRDDFRQSPGNVVVAVGEPAVLECVPPRGHPEPSVSWRKDGARLKEEEGRITIRGGKLMMSHTLKSDAGMYVCVASNMAGERESAAAEVMVLERPSFLRRPVNQVVLADAPVTFLCEVKGDPPPRLRWRKEDGELPTGRYEIRSDHSLWIGHVSAEDEGTYTCVAENSVGRAEASGSLSVHVPPQLVTQPQDQMAAPGESVAFQCETKGNPPPAIFWQKEGSQVLLFPSQSLQPTGRFSVSPRGQLNITAVQRGDAGYYVCQAVSVAGSILAKALLEIKGASLDGLPPVILQGPANQTLVLGSSVWLPCRVTGNPQPSVRWKKDGQWLQGDDLQFKTMANGTLYIANVQEMDMGFYSCVAKSSTGEATWSGWLKMREDWGVSPDPPTEPSSPPGAPSQPVVTEITKNSITLTWKPNPQTGAAVTSYVIEAFSPAAGNTWRTVADGVQLETHTVSGLQPNTIYLFLVRAVGAWGLSEPSPVSEPVRTQDSSPSRPVEDPWRGQQGLAEVAVRLQEPIVLGPRTLQVSWTVDGPVQLVQGFRVSWRVAGPEGGSWTMLDLQSPSQQSTVLRGLPPGTQIQIKVQAQGQEGLGAESLSVTRSIPEEAPSGPPQGVAVALGGDGNSSITVSWEPPLPSQQNGVITEYQIWCLGNESRFHLNRSAAGWARSAMLRGLVPGLLYRTLVAAATSAGVGVPSAPVLVQLPSPPDLEPGLEVGAGLAVRLARVLREPAFLAGSGAACGALLLGLCAALYWRRKQRKELSHYTASFAYTPAVSFPHSEGLSGASSRPPMGLGPAPYSWLADSWPHPSRSPSAQEPRGSCCPSNPDPDDRYYNEAGISLYLAQTARGTAAPGEGPVYSTIDPAGEELQTFHGGFPQHPSGDLGPWSQYAPPEWSQGDSGAKGGKVKLLGKPVQMPSLNWPEALPPPPPSCELSCLEGPEEELEGSSEPEEWCPPMPERSHLTEPSSSGGCLVTPSRRETPSPTPSYGQQSTATLTPSPPDPPQPPTDMPHLHQMPRRVPLGPSSPLSVSQPMLGIREARPAGLGAGPAASPHLSPSPAPSTASSAPGRTWQGNGEMTPPLQGPRARFRKKPKALPYRRENSPGDLPPPPLPPPEEEASWALELRAAGSMSSLERERSGERKAVQAVPLAAQRVLHPDEEAWLPYSRPSFLSRGQGTSTCSTAGSNSSRGSSSSRGSRGPGRSRSRSQSRSQSQRPGQKRREEPR

SEQ ID NO: 5811 - protein, 327 aa, Homo sapiens
MSGLSFSEMEGCRNLLGLLDNDEIMALCDTVTNRLVQPQDRQDAVHAILAYSQSAEELLRRRKVHREVIFKYLATQGIVIPPATEKHNLIQHAKDYWQKQPQLKLKETPEPVTKTEDIHLFQQQVKEDKKAEKVDFRRLGEEFCHWFFGLLNSQNPFLGPPQDEWGPQHFWHDVKLRFYYNTSEQNVMDYHGAEIVSLRLLSLVKEEFLFLSPNLDSHGLKCASSPHGLVMVGVAGTVHRGNTCLGIFEQIFGLIRCPFVENTWKIKFINLKIMGESSLAPGTLPKPSVKFEQSDLEAFYNVITVCGTNEVRHNVKQASDSGTGDQV

SEQ ID NO: 5812 - protein, 817 aa, Homo sapiens
MGERKCWLSTSRRTRWVPEELQDKEFAAVLQDEPLQPLALEPLTEEEQAAAVVTAAFTKEASKKAMGPLDEAPGKSSAARAGMTARCGFEEGGAGPRKEHARSDSENWRSLREEQEEEEEGSWRLGAGPRRDGDRWRSASPDGGPRSAGWREHGERRRKFEFDLRGDRGGCGEEEGRGGGGSSHLRRCRAPEGFEEDKDGLPEWCLDDEDEEMGTFDASGAFLPLKLFSAPHPGPMQKGPKEPIPEEQELDFQGLEEEEEPSEGLEEEGPEADDIRGIQLSPGVGSSAGPPGDLEDDEGLKHLQQGIQEAEKLVASLQDSSLEEEQFTAAMQTQGLRHSAAATALPLSHGAARKWFYKDPQGEIQGPFTTQEMAEWFQAGYFSMSLLVKRGCDEGFQPLGEVIKMWGRVPFAPGPSPPPLLGNMDQERLKKQQELAAAALYQQLQHQQFLQLVSSRQLPQCALREKAALGDLTPPPPPPPQQQQQQLTAFLQQLQALKPPSSRSAEKWSSGRSGRKRNASVERRSAASSSRRSRSGGRRRKSCFGASTWGLSMKTLLELQLEGERQLHKQPPPREPARAQAPNHRVQLGGLGTAPLNQWVSEAGPLWGGPDKSGGGSSGLGLWEDTPKSGGSLVRGLGLKNSRSSPSLSDSYSHLSGRPIRKKTEEEEKLLKLLQGIPRPQDGFTQWCEQMLHTLSATGSLDVPMAVAILKEVESPYDVHDYIRSCLGDTLEAKEFAKQFLERRAKQKASQQRQQQQEAWLSSASLQTAFQANHSTKLGPGEGSKAKRRALMLHSDPSILGYSLHGSSGEIESVDDY

SEQ ID NO: 5813 - protein, 273 aa, Homo sapiens
MGSGWVPWVVALLVNLTRLDSSMTQGTDSPEDFVIQAKADCYFTNGTEKVQFVVRFIFNLEEYVRFDSDVGMFVALTKLGQPDAEQWNSRLDLLERSRQAVDGVCRHNYRLGAPFTVGRKVQPEVTVYPERTPLLHQHNLLHCSVTGFYPGDIKIKWFLNGQEERAGVMSTGPIRNGDWTFQTVVMLEMTPELGHVYTCLVDHSSLLSPVSVEWRAQSEYSWRKMLSGIAAFLLGLIFLLVGIVIQLRAQKGYVRTQMSGNEVSRAVLLPQSC

SEQ ID NO: 5814 - protein, 710 aa, Homo sapiens
MSVPSSLSQSAINANSHGGPALSLPLPLHAAHNQLLNAKLQATAVGPKDLRSAMGEGGGPEPGPANAKWLKEGQNQLRRAATAHRDQNRNVTLTLAEEASQEPEMAPLGPKGLIHLYSELELSAHNAANRGLRGPGLIISTQEQGPDEGEEKAAGEAEEEEEDDDDEEEEEDLSSPPGLPEPLESVEAPPRPQALTDGPREHSKSASLLFGMRNSAASDEDSSWATLSQGSPSYGSPEDTDSFWNPNAFETDSDLPAGWMRVQDTSGTYYWHIPTGTTQWEPPGRASPSQGSSPQEESQLTWTGFAHGEGFEDGEFWKDEPSDEAPMELGLKEPEEGTLTFPAQSLSPEPLPQEEEKLPPRNTNPGIKCFAVRSLGWVEMTEEELAPGRSSVAVNNCIRQLSYHKNNLHDPMSGGWGEGKDLLLQLEDETLKLVEPQSQALLHAQPIISIRVWGVGRDSGRERDFAYVARDKLTQMLKCHVFRCEAPAKNIATSLHEICSKIMAERRNARCLVNGLSLDHSKLVDVPFQVEFPAPKNELVQKFQVYYLGNVPVAKPVGVDVINGALESVLSSSSREQWTPSHVSVAPATLTILHQQTEAVLGECRVRFLSFLAVGRDVHTFAFIMAAGPASFCCHMFWCEPNAASLSEAVQAACMLRYQKCLDARSQASTSCLPAPPAESVARRVGWTVRRGVQSLWGSLKPKRLGAHTP

SEQ ID NO: 5815 - protein, 708 aa, Homo sapiens
MSVPSSLSQSAINANSHGGPALSLPLPLHAAHNQLLNAKLQATAVGPKDLRSAMGEGGGPEPGPANAKWLKEGQNQLRRAATAHRDQNRNVTLTLAEEASQEPEMAPLGPKGLIHLYSELELSAHNAANRGLRGPGLIISTQEQGPDEGEEKAAGEAEEEEEDDDDEEEEEDLSSPPGLPEPLESVEAPPRPQALTDGPREHSKSASLLFGMRNSAASDEDSSWATLSQGSPSYGSPEDTDSFWNPNAFETDSDLPAGWMRVQDTSGTYYWHIPTGTTQWEPPGRASPSQGSSPQEESQLTWTGFAHGEGFEDGEFWKDEPSDEAPMELGLKEPEEGTLTFPAQSLSPEPLPQEEEKLPPRNTNPGIKCFAVRSLGWVEMTEEELAPGRSSVAVNNCIRQLSYHKNNLHDPMSGGWGEGKDLLLQLEDETLKLVEPQSQALLHAQPIISIRVWGVGRDSGRDFAYVARDKLTQMLKCHVFRCEAPAKNIATSLHEICSKIMAERRNARCLVNGLSLDHSKLVDVPFQVEFPAPKNELVQKFQVYYLGNVPVAKPVGVDVINGALESVLSSSSREQWTPSHVSVAPATLTILHQQTEAVLGECRVRFLSFLAVGRDVHTFAFIMAAGPASFCCHMFWCEPNAASLSEAVQAACMLRYQKCLDARSQASTSCLPAPPAESVARRVGWTVRRGVQSLWGSLKPKRLGAHTP

SEQ ID NO: 5816 - protein, 198 aa, Homo sapiens
MSFIFDWIYSGFSSVLQFLGLYKKTGKLVFLGLDNAGKTTLLHMLKDDRLGQHVPTLHPTSEELTIAGMTFTTFDLGGHVQARRVWKNYLPAINGIVFLVDCADHERLLESKEELDSLMTDETIANVPILILGNKIDRPEAISEERLREMFGLYGQTTGKGSISLKELNARPLEVFMCSVLKRQGYGEGFRWMAQYID

SEQ ID NO: 5817 - protein, 198 aa, Homo sapiens; identical to SEQ ID NO: 5816

SEQ ID NO: 5818 - protein, 189 aa, Homo sapiens
  MOD_RES 188: Xaa = Selenocysteine
MERQEESLSARPALETEGLRFLHTTVGSLLATYGWYIVFSCILLYVVFQKLSARLRALRQRQLDRAAAAVEPDVVVKRQEALAAARLKMQEELNAQVEKHKEKLKQLEEEKRRQKIEMWDSMQEGKSYKGNAKKPQEEDSPGPSTSSVLKRKSDRKPLRGGGYNPLSGEGGGACSWRPGRRGPSSGGXG

SEQ ID NO: 5819 - protein, 189 aa, Homo sapiens; identical to SEQ ID NO: 5818
  MOD_RES 188: Xaa = Selenocysteine

SEQ ID NO: 5820 - protein, 1070 aa, Homo sapiens
MCFSFIMPPAMADILDIWAVDSQIASDGSIPVDFLLPTGIYIQLEVPREATISYIKQMLWKQVHNYPMFNLLMDIDSYMFACVNQTAVYEELEDETRRLCDVRPFLPVLKLVTRSCDPGEKLDSKIGVLIGKGLHEFDSLKDPEVNEFRRKMRKFSEEKILSLVGLSWMDWLKQTYPPEHEPSIPENLEDKLYGGKLIVAVHFENCQDVFSFQVSPNMNPIKVNELAIQKRLTIHGKEDEVSPYDYVLQVSGRVEYVFGDHPLIQFQYIRNCVMNRALPHFILVECCKIKKMYEQEMIAIEAAINRNSSNLPLPLPPKKTRIISHVWENNNPFQIVLVKGNKLNTEETVKVHVRAGLFHGTELLCKTIVSSEVSGKNDHIWNEPLEFDINICDLPRMARLCFAVYAVLDKVKTKKSTKTINPSKYQTIRKAGKVHYPVAWVNTMVFDFKGQLRTGDIILHSWSSFPDELEEMLNPMGTVQTNPYTENATALHVKFPENKKQPYYYPPFDKIIEKAAEIASSDSANVSSRGGKKFLPVLKEILDRDPLSQLCENEMDLIWTLRQDCREIFPQSLPKLLLSIKWNKLEDVAQLQALLQIWPKLPPREALELLDFNYPDQYVREYAVGCLRQMSDEELSQYLLQLVQVLKYEPFLDCALSRFLLERALGNRRIGQFLFWHLRSEVHIPAVSVQFGVILEAYCRGSVGHMKVLSKQVEALNKLKTLNSLIKLNAVKLNRAKGKEAMHTCLKQSAYREALSDLQSPLNPCVILSELYVEKCKYMDSKMKPLWLVYNNKVFGEDSVGVIFKNGDDLRQDMLTLQMLRLMDLLWKEAGLDLRMLPYGCLATGDRSGLIEVVSTSETIADIQLNSSNVAAAAAFNKDALLNWLKEYNSGDDLDRAIEEFTLSCAGYCVASYVLGIGDRHSDNIMVKKTGQLFHIDFGHILGNFKSKFGIKRERVPFILTYDFIHVIQQGKTGNTEKFGRFRQCCEDAYLILRRHGNLFITLFALMLTAGLPELTSVKDIQYLKDSLALGKSEEEALKQFKQKFDEALRESWTTKVNWMAHTVRKDYRS

SEQ ID NO: 5821 - protein, 1112 aa, Homo sapiens
MAAGKSGGSAGEITFLEALARSESKRDGGFKNNWSFDHEEESEGDTDKDGTNLLSVDEDEDSETSKGKKLNRRSEIVANSSGEFILKTYVRRNKSESFKTLKGNPIGLNMLSNNKKLSENMQNTSLCSGTVVHGRRFHHAHAQIPVVKTAAQSSLDRKERKEYPPHVQKVEINPVRLSRLQGVERIMKKTEESESQVEPEIKRKVQQKRHCSTYQPTPPLSPASKKCLTHLEDLQRNCRQAITLNESTGPLLRTSIHQNSGGQKSQNTGLTTKKFYGNNVEKVPIDIIVNCDDSKHTYLQTNGKVILPGAKIPKITNLKERKTSLSDLNDPIILSSDDDDDNDRTNRRESISPQPADSACSSPAPSTGKVEAALNENTCRAERELRSIPEDSELNTVTLPRKARMKDQFGNSIINTPLKRRKVFSQEPPDALALSCQSSFDSVILNCRSIRVGTLFRLLIEPVIFCLDFIKIQLDEPDHDPVEIILNTSDLTKCEWCNVRKLPVVFLQAIPAVYQKLSIQLQMNKEDKVWNDCKGVNKLTNLEEQYIILIFQNGLDPPANMVFESIINEIGIKNNISNFFAKIPFEEANGRLVACTRTYEESIKGSCGQKENKIKTVSFESKIQLRSKQEFQFFDEEEETGENHTIFIGPVEKLIVYPPPPAKGGISVTNEDLHCLNEGEFLNDVIIDFYLKYLVLEKLKKEDADRIHIFSSFFYKRLNQRERRNHETTNLSIQQKRHGRVKTWTRHVDIFEKDFIFVPLNEAAHWFLAVVCFPGLEKPKYEPNPHYHENAVIQKCSTVEDSCISSSASEMESCSQNSSAKPVIKKMLNKKHCIAVIDSNPGQEESDPRYKRNICSVKYSVKKINHTASENEEFNKGESTSQKVADRTKSENGLQNESLSSTHHTDGLSKIRLNYSDESPEAGKMLEDELVDFSEDQDNQDDSSDDGFLADDNCSSEIGQWHLKPTICKQPCILLMDSLRGPSRSNVVKILREYLEVEWEVKKGSKRSFSKDVMKGSNPKVPQQNNFSDCGVYVLQYVESFFENPILSFELPMNLANWFPPPRMRTKREEIRNIILKLQEDQSKEKRKHKDTYSTEAPLGEGTEQCVNSISD

SEQ ID NO: 5822 - protein, 708 aa, Homo sapiens
MATSTSTEAKSASWWNYFFLYDGSKVKEEGDPTRAGICYFYPSQTLLDQQELLCGQIAGVVRCVSDISDSPPTLVRLRKLKFAIKVDGDYLWVLGCAVELPDVSCKRFLDQLVGFFNFYNGPVSLAYENCSQEELSTEWDTFIEQILKNTSDLHKIFNSLWNLDQTKVEPLLLLKAARILQTCQRSPHILAGCILYKGLIVSTQLPPSLTAKVLLHRTAPQEQRLPTGEDAPQEHGAALPPNVQIIPVFVTKEEAISLHEFPVEQMTRSLASPAGLQDGSAQHHPKGGSTSALKENATGHVESMAWTTPDPTSPDEACPDGRKENGCLSGHDLESIRPAGLHNSARGEVLGLSSSLGKELVFLQEELDLSEIHIPEAQEVEMASGHFAFLHVPVPDGRAPYCKASLSASSSLEPTPPEDTAISSLRPPSAPEMLTQHGAQEQLEDHPGHSSQAPIPRADPLPRRTRRPLLLPRLDPGQRGNKLPTGEQGLDEDVDGVCESHAAPGLECSSGSANCQGAGPSADGISSRLTPAESCMGLVRMNLYTHCVKGLVLSLLAEEPLLGDSAAIEEVYHSSLASLNGLEVHLKETLPRDEAASTSSTYNFTHYDRIQSLLMANLPQVATPQDRRFLQAVSLMHSEFAQLPALYEMTVRNASTAVYACCNPIQETYFQQLAPAARSSGFPNPQDGAFSLSGKAKQKLLKHGVNLL

SEQ ID NO: 5823 - protein, 703 aa, Homo sapiens
MAPLCSLARWNYFFLYDGSKVKEEGDPTRAGICYFYPSQTLLDQQELLCGQIAGVVRCVSDISDSPPTLVRLRKLKFAIKVDGDYLWVLGCAVELPDVSCKRFLDQLVGFFNFYNGPVSLAYENCSQEELSTEWDTFIEQILKNTSDLHKIFNSLWNLDQTKVEPLLLLKAARILQTCQRSPHILAGCILYKGLIVSTQLPPSLTAKVLLHRTAPQEQRLPTGEDAPQEHGAALPPNVQIIPVFVTKEEAISLHEFPVEQMTRSLASPAGLQDGSAQHHPKGGSTSALKENATGHVESMAWTTPDPTSPDEACPDGRKENGCLSGHDLESIRPAGLHNSARGEVLGLSSSLGKELVFLQEELDLSEIHIPEAQEVEMASGHFAFLHVPVPDGRAPYCKASLSASSSLEPTPPEDTAISSLRPPSAPEMLTQHGAQEQLEDHPGHSSQAPIPRADPLPRRTRRPLLLPRLDPGQRGNKLPTGEQGLDEDVDGVCESHAAPGLECSSGSANCQGAGPSADGISSRLTPAESCMGLVRMNLYTHCVKGLVLSLLAEEPLLGDSAAIEEVYHSSLASLNGLEVHLKETLPRDEAASTSSTYNFTHYDRIQSLLMANLPQVATPQDRRFLQAVSLMHSEFAQLPALYEMTVRNASTAVYACCNPIQETYFQQLAPAARSSGFPNPQDGAFSLSGKAKQKLLKHGVNLL

SEQ ID NO: 5824 - protein, 528 aa, Homo sapiens
MATSTSTEAKSASWWNYFFLYDGSKVKEEGDPTRAGICYFYPSQTLLDQQELLCGQIAGVVRCVSDISDSPPTLVRLRKLKFAIKVDGDYLWVLGCAVELPDVSCKRFLDQLVGFFNFYNGPVSLAYENCSQEELSTEWDTFIEQILKNTSDLHKIFNSLWNLDQTKVEPLLLLKAARILQTCQRSPHILAGCILYKGLIVSTQLPPSLTAKVLLHRTAPQEQRLPTGEDAPQEHGKWMLWSFKNRVTHQNPNGAALPPNVQIIPVFVTKEEAISLHEFPVEQMTRSLASPAGLQDGSAQHHPKGGSTSALKENATGHVESMAWTTPDPTSPDEACPDGRKENGCLSGHDLESIRPAGLHNSARGEVLGLSSSLGKELVFLQEELDLSEIHIPEAQEVEMASGHFAFLHVPVPDGRAPYCKASLSASSSLEPTPPEDTAISSLRPPSAPEMLTQHGAQEQLEDHPGHSSQAPIPRADPLPKSTVLFSGGCVKGSDTQLCVPGLVWYLEPQFYYVIVRHFFDSMRQTAG

SEQ ID NO: 5825 - protein, 654 aa, Homo sapiens
MSEASSEDLVPPLEAGAAPYREEEEAAKKKKEKKKKSKGLANVFCVFTKGKKKKGQPSSAEPEDAAGSRQGLDGPPPTVEELKAALERGQLEAARPLLALERELAAAAAAGGVSEEELVRRQSKVEALYELLRDQVLGVLRRPLEAPPERLRQALAVVAEQEREDRQAAAAGPGTSGLAATRPRRWLQLWRRGVAEAAEERMGQRPAAGAEVPESVFLHLGRTMKEDLEAVVERLKPLFPAEFGVVAAYAESYHQHFAAHLAAVAQFELCERDTYMLLLWVQNLYPNDIINSPKLVGELQGMGLGSLLPPRQIRLLEATFLSSEAANVRELMDRALELEARRWAEDVPPQRLDGHCHSELAIDIIQITSQAQAKAESITLDLGSQIKRVLLVELPAFLRSYQRAFNEFLERGKQLTNYRANVIANINNCLSFRMSMEQNWQVPQDTLSLLLGPLGELKSHGFDTLLQNLHEDLKPLFKRFTHTRWAAPVETLENIIATVDTRLPEFSELQGCFREELMEALHLHLVKEYIIQLSKGRLVLKTAEQQQQLAGYILANADTIQHFCTQHGSPATWLQPALPTLAEIIRLQDPSAIKIEVATYATCYPDFSKGHLSAILAIKGNLSNSEVKRIRSILDVSMGAQEPSRPLFSLIKVG

SEQ ID NO: 5826 - protein, 228 aa, Homo sapiens
MSMAVETFGFFMATVGLLMLGVTLPNSYWRVSTVHGNVITTNTIFENLWFSCATDSLGVYNCWEFPSMLALSGYIQACRALMITAILLGFLGLLLGIAGLRCTNIGGLELSRKAKLAATAGALHILAGICGMVAISWYAFNITRDFFDPLYPGTKYELGPALYLGWSASLISILGGLCLCSACCCGSDEDPAASARRPYQAPVSVMPVATSDQEGDSSFGKYGRNAYV

SEQ ID NO: 5827 - protein, 128 aa, Homo sapiens
MSMAVETFGFFMATVGLLMLGVTLPNSYWRVSTVHGNVITTNTIFENLWFSCATDSLGVYNCWEFPSMLALSGSTDSPASLSGGTGLLVRLMSIKGPCEGRRLASCRLSVRCKEAVCVQGIFRPAGHS

SEQ ID NO: 5828 - protein, 631 aa, Homo sapiens
MPRYGASLRQSCPRSGREQGQDGTAGAPGLLWMGLVLALALALALALALSDSRVLWAPAEAHPLSPQGHPARLHRIVPRLRDVFGWGNLTCPICKGLFTAINLGLKKEPNVARVGSVAIKLCNLLKIAPPAVCQSIVHLFEDDMVEVWRRSVLSPSEACGLLLGSTCGHWDIFSSWNISLPTVPKPPPKPPSPPAPGAPVSRILFLTDLHWDHDYLEGTDPDCADPLCCRRGSGLPPASRPGAGYWGEYSKCDLPLRTLESLLSGLGPAGPFDMVYWTGDIPAHDVWHQTRQDQLRALTTVTALVRKFLGPVPVYPAVGNHESTPVNSFPPPFIEGNHSSRWLYEAMAKAWEPWLPAEALRTLRIGGFYALSPYPGLRLISLNMNFCSRENFWLLINSTDPAGQLQWLVGELQAAEDRGDKVHIIGHIPPGHCLKSWSWNYYRIVARYENTLAAQFFGHTHVDEFEVFYDEETLSRPLAVAFLAPSATTYIGLNPGYRVYQIDGNYSGSSHVVLDHETYILNLTQANIPGAIPHWQLLYRARETYGLPNTLPTAWHNLVYRMRGDMQLFQTFWFLYHKGHPPSEPCGTPCRLATLCAQLSARADSPALCRHLMPDGSLPEAQSLWPRPLFC

SEQ ID NO: 5829 - protein, 587 aa, Homo sapiens
MPRYGASLRQSCPRSGREQGQDGTAGAPGLLWMGLVLALALALALALALSDSRVLWAPAEAHPLSPQGHPARLHRIVPRLRDVFGWGNLTCPICKGLFTAINLGLKKEPNVARVGSVAIKLCNLLKIAPPAVCQSIVHLFEDDMVEVWRRSVLSPSEACGLLLGSTCGHWDIFSSWNISLPTVPKPPPKPPSPPAPGAPVSRILFLTDLHWDHDYLEGTDPDCADPLCCRRGSGLPPASRPGAGYWGEYSKCDLPLRTLESLLSGLGPAGPFDMVYWTGDIPAHDVWHQTRQDQLRALTTVTALVRKFLGPVPVYPAVGNHESTPVNSFPPPFIEGNHSSRWLYEAMAKAWEPWLPAEALRTLRYLSSVETQEGKRKVHIIGHIPPGHCLKSWSWNYYRIVARYENTLAAQFFGHTHVDEFEVFYDEETLSRPLAVAFLAPSATTYIGLNPGYRVYQIDGNYSGSSHVVLDHETYILNLTQANIPGAIPHWQLLYRARETYGLPNTLPTAWHNLVYRMRGDMQLFQTFWFLYHKGHPPSEPCGTPCRLATLCAQLSARADSPALCRHLMPDGSLPEAQSLWPRPLFC

SEQ ID NO: 5830 - protein, 39 aa, Homo sapiens
MAAGAVFLALSAQLLQARLMKEESPVVSWWLEPEDGTAL

SEQ ID NO: 5831 - protein, 129 aa, Homo sapiens
MSFPKYKPSSLRTLPETLDPAEYNISPETRRAQAERLAIRAQLKREYLLQYNDPNRRGLIENPALLRWAYARTINVYPNFRPTPKNSLMGALCGFGPLIFIYYIIKTERDRKEKLIQEGKLDRTFHLSY

SEQ ID NO: 5832 - protein, 150 aa, Homo sapiens
MVLCFPLLLLLLVLWGPVCPLHAWPKRLTKAHWFEIQHIQPSPLQCNRAMSGINNYTQHCKHQNTFLHDSFQNVAAVCDLLSIVCKNRRHNCHQSSKPVNMTDCRLTSGKYPQCRYSAAAQYKFFIVACDPPQKSDPPYKLVPVHLDSIL

SEQ ID NO: 5833 - protein, 465 aa, Homo sapiens
MNVTSLFSFTSPAVKRLLGWKQGDEEEKWAEKAVDALVKKLKKKKGAMEELEKALSCPGQPSNCVTIPRSLDGRLQVSHRKGLPHVIYCRVWRWPDLQSHHELKPLECCEFPFGSKQKEVCINPYHYKRVESPVLPPVLVPRHSEYNPQHSLLAQFRNLGQNEPHMPLNATFPDSFQQPNSHPFPHSPNSSYPNSPGSSSSTYPHSPTSSDPGSPFQMPADTPPPAYLPPEDPMTQDGSQPMDTNMMAPPLPSEINRGDVQAVAYEEPKHWCSIVYYELNNRVGEAFHASSTSVLVDGFTDPSNNKNRFCLGLLSNVNRNSTIENTRRHIGKGVHLYYVGGEVYAECLSDSSIFVQSRNCNYHHGFHPTTVCKIPSGCSLKIFNNQEFAQLLAQSVNHGFETVYELTKMCTIRMSFVKGWGAEYHRQDVTSTPCWIEIHLHGPLQWLDKVLTQMGSPHNPISSVS

SEQ ID NO: 5834 - protein, 465 aa, Homo sapiens; identical to SEQ ID NO: 5833

SEQ ID NO: 5835 - protein, 551 aa, Homo sapiens
MDELFPLIFPAEPAQASGPYVEIIEQPKQRGMRFRYKCEGRSAGSIPGERSTDTTKTHPTIKINGYTGPGTVRISLVTKDPPHRPHPHELVGKDCRDGFYEAELCPDRCIHSFQNLGIQCVKKRDLEQAISQRIQTNNNPFQVPIEEQRGDYDLNAVRLCFQVTVRDPSGRPLRLPPVLPHPIFDNRAPNTAELKICRVNRNSGSCLGGDEIFLLCDKVQKEDIEVYFTGPGWEARGSFSQADVHRQVAIVFRTPPYADPSLQAPVRVSMQLRRPSDRELSEPMEFQYLPDTDDRHRIEEKRKRTYETFKSIMKKSPFSGPTDPRPPPRRIAVPSRSSASVPKPAPQPYPFTSSLSTINYDEFPTMVFPSGQISQASALAPAPPQVLPQAPAPAPAPAMVSALAQAPAPVPVLAPGPPQAVAPPAPKPTQAGEGTLSEALLQLQFDDEDLGALLGNSTDPAVFTDLASVDNSEFQQLLNQGIPVAPHTTEPMLMEYPEAITRLVTGAQRPPDPAPAPLGAPGLPNGLLSGDEDFSSIADMDFSALLSQISS

SEQ ID NO: 5836 - protein, 692 aa, Homo sapiens
MKIFCSRANPTTGSVEWLEEDEHYDYHQEIARSSYADMLHDKDRNVKYYQGIRAAVSRVKDRGQKALVLDIGTGTGLLSMMAVTAGADFCYAIEVFKPMADAAVKIVEKNGFSDKIKVINKHSTEVTVGPEGDMPCRANILVTELFDTELIGEGALPSYEHAHRHLVEENCEAVPHRATVYAQLVESGRMWSWNKLFPIHVQTSLGEQVIVPPVDVESCPGAPSVCDIQLNQVSPADFTVLSDVLPMFSIDFSKQVSSSAACHSRRFEPLTSGRAQVVLSWWDIEMDPEGKIKCTMAPFWAHSDPEEMQWRDHWMQCVYFLPQEEPVVQGSALYLVAHHDDYCVWYSLQRTSPEKNERVRQMRPVCDCQAHLLWNRPRFGEINDQDRTDRYVQALRTVLKPDSVCLCVSDGSLLSVLAHHLGVEQVFTVESSAASHKLLRKIFKANHLEDKINIIEKRPELLTNEDLQGRKVSLLLGEPFFTTSLLPWHNLYFWYVRTAVDQHLGPGAMVMPQAASLHAVVVEFRDLWRIRSPCGDCEGFDVHIMDDMIKRALDFRESREAEPHPLWEYPCRSLSEPWQILTFDFQQPVPLQPLCAEGTVELRRPGQSHAAVLWMEYHLTPECTLSTGLLEPADPEGGCCWNPHCKQAVYFFSPAPDPRALLGGPRTVSYAVEFHPDTGDIIMEFRHADTPD

SEQ ID NO: 5837 - protein, 688 aa, Homo sapiens
MSVNSEKSSSSERPEPQQKAPLVPPPPPPPPPPPPPLPDPTPPEPEEEILGSDDEEQEDPADYCKGGYHPVKIGDLFNGRYHVIRKLGWGHFSTVWLCWDMQGKRFVAMKVVKSAQHYTETALDEIKLLKCVRESDPSDPNKDMVVQLIDDFKISGMNGIHVCMVFEVLGHHLLKWIIKSNYQGLPVRCVKSIIRQVLQGLDYLHSKCKIIHTDIKPENILMCVDDAYVRRMAAEATEWQKAGAPPPSGSAVSTAPQQKPIGKISKNKKKKLKKKQKRQAELLEKRLQEIEELEREAERKIIEENITSAAPSNDQDGEYCPEVKLKTTGLEEAAEAETAKDNGEAEDQEEKEDAEKENIEKDEDDVDQELANIDPTWIESPKTNGHIENGPFSLEQQLDDEDDDEEDCPNPEEYNLDEPNAESDYTYSSSYEQFNGELPNGRHKIPESQFPEFSTSLFSGSLEPVACGSVLSEGSPLTEQEESSPSHDRSRTVSASSTGDLPKAKTRAADLLVNPLDPRNADKIRVKIADLGNACWVHKHFTEDIQTRQYRSIEVLIGAGYSTPADIWSTACMAFELATGDYLFEPHSGEDYSRDEDHIAHIIELLGSIPRHFALSGKYSREFFNRRGELRHITKLKPWSLFDVLVEKYGWPHEDAAQFTDFLIPMLEMVPEKRASAGECLRHPWLNS

SEQ ID NO: 5838 - protein, 699 aa, Homo sapiens
MSSRKVLAIQARKRRPKREKHPKKPEPQQKAPLVPPPPPPPPPPPPPLPDPTPPEPEEEILGSDDEEQEDPADYCKGGYHPVKIGDLFNGRYHVIRKLGWGHFSTVWLCWDMQGKRFVAMKVVKSAQHYTETALDEIKLLKCVRESDPSDPNKDMVVQLIDDFKISGMNGIHVCMVFEVLGHHLLKWIIKSNYQGLPVRCVKSIIRQVLQGLDYLHSKCKIIHTDIKPENILMCVDDAYVRRMAAEATEWQKAGAPPPSGSAVSTAPQQKPIGKISKNKKKKLKKKQKRQAELLEKRLQEIEELEREAERKIIEENITSAAPSNDQDGEYCPEVKLKTTGLEEAAEAETAKDNGEAEDQEEKEDAEKENIEKDEDDVDQELANIDPTWIESPKTNGHIENGPFSLEQQLDDEDDDEEDCPNPEEYNLDEPNAESDYTYSSSYEQFNGELPNGRHKIPESQFPEFSTSLFSGSLEPVACGSVLSEGSPLTEQEESSPSHDRSRTVSASSTGDLPKAKTRAADLLVNPLDPRNADKIRVKIADLGNACWVHKHFTEDIQTRQYRSIEVLIGAGYSTPADIWSTACMAFELATGDYLFEPHSGEDYSRDEDHIAHIIELLGSIPRHFALSGKYSREFFNRRGELRHITKLKPWSLFDVLVEKYGWPHEDAAQFTDFLIPMLEMVPEKRASAGECLRHPWLNS

SEQ ID NO: 5839 - protein, 835 aa, Homo sapiens
MSGGSQVHIFWGAPIAPLKITVSEDTASLMSVADPWKKIQLLYSQHSLYLKDEKQHKNLENYKVPESIGSPDLSGHFLANCMNRHVHVKDDFVRSVSETQNIESQKIHSSRLSDITSSNMQICGFKSTVPHFTEEEKYQKLLSENKIRDEQPKHQPDICGKNFNTNLFQLGHKCAAVLDLVCSTEKINIGPEVVQRECVPTEYHEIQNQCLGLFSSNAVDKSRSEAAVRKVSDLKISTDTEFLSIITSSQVAFLAQKKDKRRSPVNKGNVNMETEPKASYGEIRIPEENSIQLDGFTEAYESGQNQAYSLELFSPVCPKTENSRIHINSDKGLEEHTGSQELFSSEDELPPNEIRIELCSSGILCSQLNTFHKSAIKRSCTSEDKVGQSEALSRVLQVAKKMKLISNGGDSAVEMDRRNVSEFKSIKKTSLIKNCDSKSQKYNCLVMVLSPCHVKEINIKFGPNSGSKVPLATVTVIDQSETKKKVFLWRTAAFWAFTVFLGDIILLTDVVIHEDQWIGETVLQSTFSSQLLNLGSYSSIQPEEYSSVVSEVVLQDLLAYVSSKHSYLRDLPPRQPQRVNSIDFVELEHLQPDVLVHAVLRVVDFTILTEAVYSYRGQKQKKVMLTVEQAQDQHYALVLWGPGAAWYPQLQRKKGVVLIKAQISELAFPITASQKIALNAHSSLKSIFSSLPNIVYTGCAKCGLELETDENRIYKQCFSCLPLTMKKIYYRPALMTAIDGRHDVCIRVESKLIEKILLNISADCLNRVIVPSSEITYGMVVADLFHSLLAVSAEPCVLKIQSLFVLDENSYPLQQDFSLLDFYPDIVKHGANARL

SEQ ID NO: 5840 - protein, 784 aa, Homo sapiens
MDADDSRAPKGSLRKFLEHLSGAGKAIGVLTSGGDAQGMNAAVRAVVRMGIYVGAKVYFIYEGYQGMVDGGSNIAEADWESVSSILQVGGTIIGSARCQAFRTREGRLKAACNLLQRGITNLCVIGGDGSLTGANLFRKEWSGLLEELARNGQIDKEAVQKYAYLNVVGMVGSIDNDFCGTDMTIGTDSALHRIIEVVDAIMTTAQSHQRTFVLEVMGRHCGYLALVSALACGADWVFLPESPPEEGWEEQMCVKLSENRARKKRLNIIIVAEGAIDTQNKPITSEKIKELVVTQLGYDTRVTILGHVQRGGTPSAFDRILASRMGVEAVIALLEATPDTPACVVSLNGNHAVRLPLMECVQMTQDVQKAMDERRFQDAVRLRGRSFAGNLNTYKRLAIKLPDDQIPKTNCNVAVINVGAPAAGMNAAVRSAVRVGIADGHRMLAIYDGFDGFAKGQIKEIGWTDVGGWTGQGGSILGTKRVLPGKYLEEIATQMRTHSINALLIIGGFEAYLGLLELSAAREKHEEFCVPMVMVPATVSNNVPGSDFSIGADTALNTITDTCDRIKQSASGTKRRVFIIETMGGYCGYLANMGGLAAGADAAYIFEEPFDIRDLQSNVEHLTEKMKTTIQRGLVLRNESCSENYTTDFIYQLYSEEGKGVFDCRKNVLGHMQQGGAPSPFDRNFGTKISARAMEWITAKLKEARGRGKKFTTDDSICVLGISKRNVIFQPVAELKKQTDFEHRIPKEQWWLKLRPLMKILAKYKASYDVSDSGQLEHVQPWSV

SEQ ID NO: 5841 - protein, 873 aa, Homo sapiens
MASRRKSTTPCMVLASEQDPDLELISDLDEGPPVLTPVENTRAESISSDEEVHESVDSDNQQNKKVEGGYECKYCTFQTPDLNMFTFHVDSEHPNVVLNSSYVCVECNFLTKRYDALSEHNLKYHPGEENFKLTMVKRNNQTIFEQTINDLTFDGSFVKEENAEQAESTEVSSSGISISKTPIMKMMKNKVENKRIAVHHNSVEDVPEEKENEIKPDREEIVENPSSSASESNTSTSIVNRIHPSTASTVVTPAAVLPGLAQVITAVSAQQNSNLIPKVLIPVNSIPTYNAALDNNPLLLNTYNKFPYPTMSEITVLSAQAKYTEEQIKIWFSAQRLKHGVSWTPEEVEEARRKQFNGTVHTVPQTITVIPTHISTGSNGLPSILQTCQIVGQPGLVLTQVAGTNTLPVTAPIALTVAGVPSQNNIQKSQVPAAQPTAETKPATAAVPTSQSVKHETALVNPDSFGIRAKKTKEQLAELKVSYLKNQFPHDSEIIRLMKITGLTKGEIKKWFSDTRYNQRNSKSNQCLHLNNDSSTTIIIDSSDETTESPTVGTAQPKQSWNPFPDFTPQKFKEKTAEQLRVLQASFLNSSVLTDEELNRLRAQTKLTRREIDAWFTEKKKSKALKEEKMEIDESNAGSSKEEAGETSPADESGAPKSGSTGKICKKTPEQLHMLKSAFVRTQWPSPEEYDKLAKESGLARTDIVSWFGDTRYAWKNGNLKWYYYYQSANSSSMNGLSSLRKRGRGRPKGRGRGRPRGRPRGSKRINNWDRGPSLIKFKTGTAILKDYYLKHKFLNEQDLDELVNKSHMGYEQVREWFAERQRRSELGIELFEENEEEDEVIDDQEEDEEETDDSDTWEPPRHVKRKLSKSDD

SEQ ID NO: 5842 - protein, 873 aa, Homo sapiens; identical to SEQ ID NO: 5841

SEQ ID NO: 5843 - protein, 1096 aa, Homo sapiens
MGSEDHGAQNPSCKIMTFRPTMEEFKDFNKYVAYIESQGAHRAGLAKIIPPKEWKPRQTYDDIDDVVIPAPIQQVVTGQSGLFTQYNIQKKAMTVGEYRRLANSEKYCTPRHQDFDDLERKYWKNLTFVSPIYGADISGSLYDDDVAQWNIGSLRTILDMVERECGTIIEGVNTPYLYFGMWKTTFAWHTEDMDLYSINYLHFGEPKSWYAIPPEHGKRLERLAIGFFPGSSQGCDAFLRHKMTLISPIILKKYGIPFSRITQEAGEFMITFPYGYHAGFNHGFNCAESTNFATLRWIDYGKVATQCTCRKDMVKISMDVFVRILQPERYELWKQGKDLTVLDHTRPTALTSPELSSWSASRASLKAKLLRRSHRKRSQPKKPKPEDPKFPGEGTAGAALLEEAGGSVKEEAGPEVDPEEEEEEPQPLPHGREAEGAEEDGRGKLRPTKAKSERKKKSFGLLPPQLPPPPAHFPSEEALWLPSPLEPPVLGPGPAAMEESPLPAPLNVVPPEVPSEELEAKPRPIIPMLYVVPRPGKAAFNQEHVSCQQAFEHFAQKGPTWKEPVSPMELTGPEDGAASSGAGRMETKARAGEGQAPSTFSKLKMEIKKSRRHPLGRPPTRSPLSVVKQEASSDEEASPFSGEEDVSDPDALRPLLSLQWKNRAASFQAERKFNAAAARTEPYCAICTLFYPYCQALQTEKEAPIASLGEGCPATLPSKSRQKTRPLIPEMCFTSGGENTEPLPANSYIGDDGTSPLIACGKCCLQVHASCYGIRPELVNEGWTCSRCAAHAWTAECCLCNLRGGALQMTTDRRWIHVICAIAVPEARFLNVIERHPVDISAIPEQRWKLKCVYCRKRMKKVSGACIQCSYEHCSTSFHVTCAHAAGVLMEPDDWPYVVSITCLKHKSGGHAVQLLRAVSLGQVVITKNRNGLYYRCRVIGAASQTCYEVNFDDGSYSDNLYPESITSRDCVQLGPPSEGELVELRWTDGNLYKAKFISSVTSHIYQVEFEDGSQLTVKRGDIFTLEEELPKRVRSRLSLSTGAPQEPAFSGEEAKAAKRPRVGTPLATEDSGRSQDYVAFVESLLQVQGRPGAPF

SEQ ID NO: 5844 - protein, 2663 aa, Homo sapiens
MPKGGCPKAPQQEELPLSSDMVEKQTGKKDKDKVSLTKTPKLERGDGGKEVRERASKRKLPFTAGANGEQKDSDTEKQGPERKRIKKEPVTRKAGLLFGMGLSGIRAGYPLSERQQVALLMQMTAEESANSPVDTTPKHPSQSTVCQKGTPNSASKTKDKVNKRNERGETRLHRAAIRGDARRIKELISEGADVNVKDFAGWTALHEACNRGYYDVAKQLLAAGAEVNTKGLDDDTPLHDAANNGHYKVVKLLLRYGGNPQQSNRKGETPLKVANSPTMVNLLLGKGTYTSSEESSTESSEEEDAPSFAPSSSVDGNNTDSEFEKGLKHKAKNPEPQKATAPVKDEYEFDEDDEQDRVPPVDDKHLLKKDYRKETKSNSFISIPKMEVKSYTKNNTIAPKKASHRILSDTSDEEDASVTVGTGEKLRLSAHTILPGSKTREPSNAKQQKEKNKVKKKRKKETKGREVRFGKRSDKFCSSESESESSESGEDDRDSLGSSGCLKGSPLVLKDPSLFSSLSASSTSSHGSSAAQKQNPSHTDQHTKHWRTDNWKTISSPAWSEVSSLSDSTRTRLTSESDYSSEGSSVESLKPVRKRQEHRKRASLSEKKSPFLSSAEGAVPKLDKEGKVVKKHKTKHKHKNKEKGQCSISQELKLKSFTYEYEDSKQKSDKAILLENDLSTENKLKVLKHDRDHFKKEEKLSKMKLEEKEWLFKDEKSLKRIKDTNKDISRSFREEKDRSNKAEKERSLKEKSPKEEKLRLYKEERKKKSKDRPSKLEKKNDLKEDKISKEKEKIFKEDKEKLKKEKVYREDSAFDEYCNKNQFLENEDTKFSLSDDQRDRWFSDLSDSSFDFKGEDSWDSPVTDYRDMKSDSVAKLILETVKEDSKERRRDSRAREKRDYREPFFRKKDRDYLDKNSEKRKEQTEKHKSVPGYLSEKDKKRRESAEAGRDRKDALESCKERRDGRAKPEEAHREELKECGCESGFKDKSDGDFGKGLEPWERHHPAREKEKKDGPDKERKEKTKPERYKEKSSDKDKSEKSILEKCQKDKEFDKCFKEKKDTKEKHKDTHGKDKERKASLDQGKEKKEKAFPGIISEDFSEKKDDKKGKEKSWYIADIFTDESEDDRDSCMGSGFKMGEASDLPRTDGLQEKEEGREAYASDRHRKSSDKQHPERQKDKEPRDRRKDRGAADAGRDKKEKVFEKHKEKKDKESTEKYKDRKDRASVDSTQDKKNKQKLPEKAEKKHAAEDKAKSKHKEKSDKEHSKERKSSRSADAEKSLLEKLEEEALHEYREDSNDKISEVSSDSFTDRGQEPGLTAFLEVSFTEPPGDDKPRESACLPEKLKEKERHRHSSSSSKKSHDRERAKKEKAEKKEKGEDYKEGGSRKDSGQYEKDFLEADAYGVSYNMKADIEDELDKTIELFSTEKKDKNDSEREPSKKIEKELKPYGSSAINILKEKKKREKHREKWRDEKERHRDRHADGLLRHHRDELLRHHRDEQKPATRDKDSPPRVLKDKSRDEGPRLGDAKLKEKFKDGAEKEKGDPVKMSNGNDKVAPSKDPGKKDARPREKLLGDGDLMMTSFERMLSQKDLEIEERHKRHKERMKQMEKLRHRSGDPKLKEKAKPADDGRKKGLDIPAKKPPGLDPPFKDKKLKESTPIPPAAENKLHPASGADSKDWLAGPHMKEVLPASPRPDQSRPTGVPTPTSVLSCPSYEEVMHTPRTPSCSADDYADLVFDCADSQHSTPVPTAPTSACSPSFFDRFSVASSGLSENASQAPARPLSTNLYRSVSVDIRRTPEEEFSVGDKLFRQQSVPAASSYDSPMPPSMEDRAPLPPVPAEKFACLSPGYYSPDYGLPSPKVDALHCPPAAVVTVTPSPEGVFSSLQAKPSPSPRAELLVPSLEGALPPDLDTSEDQQATAAIIPPEPSYLEPLDEGPFSAVITEEPVEWAHPSEQALASSLIGGTSENPVSWPVGSDLLLKSPQRFPESPKRFCPADPLHSAAPGPFSASEAPYPAPPASPAPYALPVAEPGLEDVKDGVDAVPAAISTSEAAPYAPPSGLESFFSNCKSLPEAPLDVAPEPACVAAVAQVEALGPLENSFLDGSRGLSHLGQVEPVPWADAFAGPEDDLDLGPFSLPELPLQTKDAADGEAEPVEESLAPPEEMPPGAPGVINGGDVSTVVAEEPPALPPDQASTRLPAELEPEPSGEPKLDVALEAAVEAETVPEERARGDPDSSVEPAPVPPEQRPLGSGDQGAEAEGPPAASLCAPDGPAPNTVAQAQAADGAGPEDDTEASRAAAPAEGPPGGIQPEAAEPKPTAEAPKAPRVEEIPQRMTRNRAQMLANQSKQGPPPSEKECAPTPAPVTRAKARGSEDDDAQAQHPRKRRFQRSTQQLQQQLNTSTQQTREVIQQTLAAIVDAIKLDAIEPYHSDRANPYFEYLQIRKKIEEKRKILCCITPQAPQCYAEYVTYTGSYLLDGKPLSKLHIPVIAPPPSLAEPLKELFRQQEAVRGKLRLQHSIEREKLIVSCEQEILRVHCRAARTIANQAVPFSACTMLLDSEVYNMPLESQGDENKSVRDRFNARQFISWLQDVDDKYDRMKTCLLMRQQHEAAALNAVQRMEWQLKVQELDPAGHKSLCVNEVPSFYVPMVDVNDDFVLLPA

SEQ ID NO: 5845 - protein, 786 aa, Homo sapiens
MWFFARDPVRDFPFELIPEPPEAACPGPGPCTAAARRATGSPVSIFVYDVKPGAEEQTQVAKAAFKRFKTLRHPNILAYIDGLETEKCLHVVTEAVTPLGIYLKARVEAGGLKELEISWGLHQIVKALSFLVNDCSLIHNNVCMAAVFVDRAGEWKLGGLDYMYSAQATGGGPPRKGIPELEQYDPPELADSSGRVVREKWSADMWRLGCLIWEVFNGPLPRAAALRNPGKIPKTLVPHYCELVGANPKVRPNPARFLQNCRAPGGFMSNRFVETNLFLEEIQIKEPAEKQKFFQELSKSLDAFPEDFCRHKVLPQLLTAFEFGNAGAVVLTPLFKVGKFLSAEEYQQKIIPVVVKMFSSTDRAMRIRLLQQMEQFIQYLDEPTVNTQIFPHVVHGFLDTNPAIREQTVKSMLLLAPKLNEANLNVELMKHFARLQAKDEQGPIRCNTTVCLGKIGSYLSASTRHRVLTSAFSRATRDPFAPSRVAGVLGFAATHNLYSMNDCAQKILPVLCGLTVDPEKSVRDQAFKAIRSFLSKLESVSEDPTQLEEVEKDVHAASSPGMGGAAASWAGWAVTGVSHSPQADPFAPNHCPTETNIPQRPTLKEFLPQPPTPVPATPTTSGHWETQEEDKDTAEDSSTADRWDDEDWGSLEQEAESVLAQQDDWSTGGQVSRASQSPTGAAGKLRAPGNRAGRSQAPRSHLLTVHGWPASITGVAQSPATRATPSLPCLHVPAPSRGQTLGVRTTGRASRLTVDRSRLSWPGRSARSGGGRWRPNAPRGRWPRAP

SEQ ID NO: 5846 - protein, 691 aa, Homo sapiens
MEESPLSRAPSRGGVNFLNVARTYIPNTKVECHYTLPPGTMPSASDWIGIFKVEAACVRDYHTFVWSSVPESTTDGSPIHTSVQFQASYLPKPGAQLYQFRYVNRQGQVCGQSPPFQFREPRPMDELVTLEEADGGSDILLVVPKATVLQNQLDESQQERNDLMQLKLQLEGQVTELRSRVQELERALATARQEHTELMEQYKGISRSHGEITEERDILSRQQGDHVARILELEDDIQTISEKVLTKEVELDRLRDTVKALTREQEKLLGQLKEVQADKEQSEAELQVAQQENHHLNLDLKEAKSWQEEQSAQAQRLKDKVAQMKDTLGQAQQRVAELEPLKEQLRGAQELAASSQQKATLLGEELASAAAARDRTIAELHRSRLEVAEVNGRLAELGLHLKEEKCQWSKERAGLLQSVEAEKDKILKLSAEILRLEKAVQEERTQNQVFKTELAREKDSSLVQLSESKRELTELRSALRVLQKEKEQLQEEKQELLEYMRKLEARLEKVADEKWNEDATTEDEEAAVGLSCPAALTDSEDESPEDMRLPPYGLCERGDPGSSPAGPREASPLVVISQPAPISPHLSGPAEDSSSDSEAEDEKSVLMAAVQSGGEEANLLLPELGSAFYDMASGFTVGTLSETSTGGPATPTWKECPICKERFPAESDKDALEDHMDGHFFFSTQDPFTFE

SEQ ID NO: 5847 - protein, 414 aa, Homo sapiens
MSEYIRVTEDENDEPIEIPSEDDGTVLLSTVTAQFPGACGLRYRNPVSQCMRGVRLVEGILHAPDAGWGNLVYVVNYPKDNKRKMDETDASSAVKVKRAVQKTSDLIVLGLPWKTTEQDLKEYFSTFGEVLMVQVKKDLKTGHSKGFGFVRFTEYETQVKVMSQRHMIDGRWCDCKLPNSKQSQDEPLRSRKVFVGRCTEDMTEDELREFFSQYGDVMDVFIPKPFRAFAFVTFADDQIAQSLCGEDLIIKGISVHISNAEPKHNSNRQLERSGRFGGNPGGFGNQGGFGNSRGGGAGLGNNQGSNMGGGMNFGAFSINPAMMAAAQAALQSSWGMMGMLASQQNQSGPSGNNQNQGNMQREPNQAFGSGNNSYSGSNSGAAIGWGSASNAGSGSGFNGGFGSSMDSKSSGWGM

SEQ ID NO: 5848 - protein, 167 aa, Homo sapiens
MSLALRSELVVDKTKRKKRRELSEEQKQEIKDAFELFDTDKDEAIDYHELKVAMRALGFDVKKADVLKILKDYDREATGKITFEDFNEVVTDWILERDPHEEILKAFKLFDDDDSGKISLRNLRRVARELGENMSDEELRAMIEEFDKDGDGEINQEEFIAIMTGDI

SEQ ID NO: 5849 - protein, 305 aa, Homo sapiens
MPCQRTAWIGCDRQRTPPFHWREIKSRVLMTPLALSPPRSTPEPDLSSIPQDAATVPSLAAPQALTVCLYINKQANAGPYLERKKVQQLPEHFGPERPSAVLQQAVQACIDCAHQQKLVFSLVKQGYGGEMVSVSASFDGKQHLRSLPVVNSIGYVLRFLAKLCRSLLCDDLFSHQPFPRGCSASEKVQEKEEGRMESVKTVTTEEYLVNPVGMNRYSVDTSASTFNHRGSLHPSSSLYCKRQNSGDSHLGGGPAATAGGPRTSPMSSGGPSAPGLRPPASSPKRNTTSLEGNRCGNVMHASASH

SEQ ID NO: 5850 - protein, 131 aa, Homo sapiens
MAGIKALISLSFGGAIGLMFLMLGCALPIYNKYWPLFVLFFYILSPIPYCIARRLVDDTDAMSNACKELAIFLTTGIVVSAFGLPIVFARAHLIEWGACALVLTGNTVIFATILGFFLVFGSKDDFSWQQW

SEQ ID NO: 5851 - protein, 584 aa, Homo sapiens
MAGGVDGPIGIPFPDHSSDILSGLNEQRTQGLLCDVVILVEGREFPTHRSVLAACSQYFKKLFTSGAVVDQQNVYEIDFVSAEALTALMDFAYTATLTVSTANVGDILSAARLLEIPAVSHVCADLLDRQILAADAGADAGQLDLVDQIDQRNLLRAKEYLEFFQSNPMNSLPPAAAAAAASFPWSAFGASDDDLDATKEAVAAAVAAVAAGDCNGLDFYGPGPPAERPPTGDGDEGDSNPGLWPERDEDAPTGGLFPPPVAPPAATQNGHYGRGGEEEAASLSEAAPEPGDSPGFLSGAAEGEDGDGPDVDGLAASTLLQQMMSSVGRAGAAAGDSDEESRADDKGVMDYYLKYFSGAHDGDVYPAWSQKVEKKIRAKAFQKCPICEKVIQGAGKLPRHIRTHTGEKPYECNICKVRFTRQDKLKVHMRKHTGEKPYLCQQCGAAFAHNYDLKNHMRVHTGLRPYQCDSCCKTFVRSDHLHRHLKKDGCNGVPSRRGRKPRVRGGAPDPSPGATATPGAPAQPSSPDARRNGQEKHFKDEDEDEDVASPDGLGRLNVAGAGGGGDSGGGPGAATDGNFTAGLA

SEQ ID NO: 5852 - protein, 327 aa, Homo sapiens
MADGELNVDSLITRLLEVRGCRPGKIVQMTEAEVRGLCIKSREIFLSQPILLELEAPLKICGDIHGQYTDLLRLFEYGGFPPEANYLFLGDYVDRGKQSLETICLLLAYKIKYPENFFLLRGNHECASINRIYGFYDECKRRFNIKLWKTFTDCFNCLPIAAIVDEKIFCCHGGLSPDLQSMEQIRRIMRPTDVPDTGLLCDLLWSDPDKDVQGWGENDRGVSFTFGADVVSKFLNRHDLDLICRAHQVVEDGYEFFAKRQLVTLFSAPNYCGEFDNAGGMMSVDETLMCSFQILKPSEKKAKYQYGGLNSGRPVTPPRTANPPKKR

SEQ ID NO: 5853 - protein, 327 aa, Homo sapiens; identical to SEQ ID NO: 5852

SEQ ID NO: 5854 - protein, 45 aa, Homo sapiens
MADGELNVDSLITRLLEQPLWMRRSSVVMEDCHQTCNLWSRFGEL

SEQ ID NO: 5855 - protein, 515 aa, Homo sapiens
MWRLPGLLGRALPRTLGPSLWRVTPKSTSPDGPQTTSSTLLVPVPNLDRSGPHGPGTSGGPRSHGWKDAFQWMSSRVSPNTLWDAISWGTLAVLALQLARQIHFQASLPAGPQRVEHCSWHSPLDRFFSSPLWHPCSSLRQHILPSPDGPAPRHTGLREPRLGQEEASAQPRNFSHNSLRGARPQDPSEEGPGDFGFLHASSSIESEAKPAQPQPTGEKEQDKSKTLSLEEAVTSIQQLFQLSVSITFNFLGTENMKSGDHTAAFSYFQKAAARGYSKAQYNAGLCHEHGRGTPRDISKAVLYYQLAASQGHSLAQYRYARCLLRDPASSWNPERQRAVSLLKQAADSGLREAQAFLGVLFTKEPYLDEQRAVKYLWLAANNGDSQSRYHLGICYEKGLGVQRNLGEALRCYQQSAALGNEAAQERLRALFSMGAAAPGPSDLTVTGLKSFSSPSLCSLNTLLAGTSRLPHASSTGNLGLLCRSGHLGASLEASSRAIPPHPYPLERSVVRLGFG

SEQ ID NO: 5856 - protein, 151 aa, Homo sapiens
MRFLAATFLLLALSTAAQAEPVQFKDCGSVDGVIKEVNVSPCPTQPCQLSKGQSYSVNVTFTSNIQSKSSKAVVHGILMGVPVPFPIPEPDGCKSGINCPIQKDKTYSYLNKLPVKSEYPSIKLVVEWQLQDDKNQSLFCWEIPVQIVSHL

SEQ ID NO: 5857 - protein, 348 aa, Homo sapiens
MAAGVAGWGVEAEEFEDAPDVEPLEPTLSNIIEQRSLKWIFVGGKGGVGKTTCSCSLAVQLSKGRESVLIISTDPAHNISDAFDQKFSKVPTKVKGYDNLFAMEIDPSLGVAELPDEFFEEDNMLSMGKKMMQEAMSAFPGIDEAMSYAEVMRLVKGMNFSVVVFDTAPTGHTLRLLNFPTIVERGLGRLMQIKNQISPFISQMCNMLGLGDMNADQLASKLEETLPVIRSVSEQFKDPEQTTFICVCIAEFLSLYETERLIQELAKCKIDTHNIIVNQLVFPDPEKPCKMCEARHKIQAKYLDQMEDLYEDFHIVKLPLLPHEVRGADKVNTFSALLLEPYKPPSAQ

SEQ ID NO: 5858 - protein, 527 aa, Homo sapiens
MSDTLTADVIGRRVEVNGEHATVRFAGVVPPVAGPWLGVEWDNPERGKHDGSHEGTVYFKCRHPTGGSFIRPNKVNFGTDFLTAIKNRYVLEDGPEEDRKEQIVTIGNKPVETIGFDSIMKQQSQLSKLQEVSLRNCAVSCAGEKGGVAEACPNIRKVDLSKNLLSSWDEVIHIADQLRHLEVLNVSENKLKFPSGSVLTGTLSVLKVLVLNQTGITWAEVLRCVAGCPGLEELYLESNNIFISERPTDVLQTVKLLDLSSNQLIDENQLYLIAHLPRLEQLILSDTGISSLHFPDAGIGCKTSMFPSLKYLVVNDNQISQWSFFNELEKLPSLRALSCLRNPLTKEDKEAETARLLIIASIGQLKTLNKCEILPEERRRAELDYRKAFGNEWKQAGGHKDPEKNRLSEEFLTAHPRYQFLCLKYGAPEDWELKTQQPLMLKNQLLTLKIKYPHQLDQKVLEKQLPGSMTIQKVKGLLSRLLKVPVSDLLLSYESPKKPGREIELENDLKSLQFYSVENGDCLLVRW

SEQ ID NO: 5859 - protein, 137 aa, Homo sapiens
MTMETVESQHDGSITASLTESKSAHVQTQTGQNSIPALAQVAAIAETDESAESEGVIDSHKRREILSRRPSYRKILNELSSDVPGVPKIEEERSEEEGTPPSIATMAVPTSIYQTSTGQYSMYAAIRYDTVLALSLL

SEQ ID NO: 5860 - protein, 300 aa, Homo sapiens
MSKCARKKYIKTNPRQMTMETVESQHDGSITASLTESKSAHVQTQTGQNSIPALAQVAAIAETDESAESEGVIDSHKRREILSRRPSYRKILNELSSDVPGVPKIEEERSEEEGTPPSIATMAVPTSIYQTSTGQYIAIAQGGTIQISNPGSDGVQGLQALTMTNSGAPPPGATIVQYAAQSADGTQQFFVPGSQVVVQAATGDMPTYQIRAPTAALPQGVVMAASPGSLHSPQQLAEEATRKRELRLMKNREAAKECRRRKKEYVKCLESRVAVLEVQNKKLIEELETLKDICSPKTDY

SEQ ID NO: 5861 - protein, 120 aa, Homo sapiens
MAVTGDDTDEETELAPSHMAAATGDMPTYQIRAPTAALPQGVVMAASPGSLHSPQQLAEEATRKRELRLMKNREAARECRRKKKEYVKCLENRVAVLENQNKTLIEELKALKDLYCHKVE

SEQ ID NO: 5862 - protein, 109 aa, Homo sapiens
MAVTGDDTAATGDMPTYQIRAPTAALPQGVVMAASPGSLHSPQQLAEEATRKRELRLMKNREAAKECRRRKKEYVKCLESRVAVLEVQNKKLIEELETLKDICSPKTDY

SEQ ID NO: 5863 - protein, 121 aa, Homo sapiens
MAVTGDDTDEETELAPSHMAAATGDMPTYQIRAPTAALPQGVVMAASPGSLHSPQQLAEEATRKRELRLMKNREAAKECRRRKKEYVKCLESRVAVLEVQNKKLIEELETLKDICSPKTDY

SEQ ID NO: 5864 - protein, 108 aa, Homo sapiens
MAVTGDDTAATGDMPTYQIRAPTAALPQGVVMAASPGSLHSPQQLAEEATRKRELRLMKNREAARECRRKKKEYVKCLENRVAVLENQNKTLIEELKALKDLYCHKVE

SEQ ID NO: 5865 - protein, 112 aa, Homo sapiens
MNRTQELSGQLSAATGDMPTYQIRAPTAALPQGVVMAASPGSLHSPQQLAEEATRKRELRLMKNREAARECRRKKKEYVKCLENRVAVLENQNKTLIEELKALKDLYCHKVE

SEQ ID NO: 5866 - protein, 95 aa, Homo sapiens
MPTYQIRAPTAALPQGVVMAASPGSLHSPQQLAEEATRKRELRLMKNREAARECRRKKKEYVKCLENRVAVLENQNKTLIEELKALKDLYCHKVE

SEQ ID NO: 5867 - protein, 102 aa, Homo sapiens
MAAATGDMPTYQIRAPTAALPQGVVMAASPGSLHSPQQLAEEATRKRELRLMKNREAARECRRKKKEYVKCLENRVAVLENQNKTLIEELKALKDLYCHKVE

SEQ ID NO: 5868 - protein, 113 aa, Homo sapiens
MNRTQELSGQLSAATGDMPTYQIRAPTAALPQGVVMAASPGSLHSPQQLAEEATRKRELRLMKNREAAKECRRRKKEYVKCLESRVAVLEVQNKKLIEELETLKDICSPKTDY

SEQ ID NO: 5869 - protein, 96 aa, Homo sapiens
MPTYQIRAPTAALPQGVVMAASPGSLHSPQQLAEEATRKRELRLMKNREAAKECRRRKKEYVKCLESRVAVLEVQNKKLIEELETLKDICSPKTDY

SEQ ID NO: 5870 - protein, 245 aa, Homo sapiens
MVAAIAETDESAESEGVIDSHKRREILSRRPSYRKILNELSSDVPGVPKIEEERSEEEGTPPSIATMAVPTSIYQTSTGQYIAIAQGGTIQISNPGSDGVQGLQALTMTNSGAPPPGATIVQYAAQSADGTQQFFVPGSQVVVQAATGDMPTYQIRAPTAALPQGVVMAASPGSLHSPQQLAEEATRKRELRLMKNREAAKECRRRKKEYVKCLESRVAVLEVQNKKLIEELETLKDICSPKTDY

SEQ ID NO: 5871 - protein, 182 aa, Homo sapiens
MVAAIAETDESAESEGVIDSHKRREILSRRPSYRKILNELSSDVPGVPKIEEERSEEEGTPPSIATMAVPTSIYQTSTGQYTATGDMPTYQIRAPTAALPQGVVMAASPGSLHSPQQLAEEATRKRELRLMKNREAAKECRRRKKEYVKCLESRVAVLEVQNKKLIEELETLKDICSPKTDY

SEQ ID NO: 5872 - protein, 270 aa, Homo sapiens
MWWHQHNLCFRRPIEEDYSSGDVEEKVAAIAETDESAESEGVIDSHKRREILSRRPSYRKILNELSSDVPGVPKIEEERSEEEGTPPSIATMAVPTSIYQTSTGQYIAIAQGGTIQISNPGSDGVQGLQALTMTNSGAPPPGATIVQYAAQSADGTQQFFVPGSQVVVQAATGDMPTYQIRAPTAALPQGVVMAASPGSLHSPQQLAEEATRKRELRLMKNREAAKECRRRKKEYVKCLESRVAVLEVQNKKLIEELETLKDICSPKTDY

SEQ ID NO: 5873 - protein, 207 aa, Homo sapiens
MWWHQHNLCFRRPIEEDYSSGDVEEKVAAIAETDESAESEGVIDSHKRREILSRRPSYRKILNELSSDVPGVPKIEEERSEEEGTPPSIATMAVPTSIYQTSTGQYTATGDMPTYQIRAPTAALPQGVVMAASPGSLHSPQQLAEEATRKRELRLMKNREAAKECRRRKKEYVKCLESRVAVLEVQNKKLIEELETLKDICSPKTDY

SEQ ID NO: 5874 - protein, 96 aa, Homo sapiens; identical to SEQ ID NO: 5869

SEQ ID NO: 5875 - protein, 95 aa, Homo sapiens; identical to SEQ ID NO: 5866

SEQ ID NO: 5876 - protein, 299 aa, Homo sapiens
MSKCARKKYIKTNPRQMTMETVESQHDGSITASLTESKSAHVQTQTGQNSIPALAQVAAIAETDESAESEGVIDSHKRREILSRRPSYRKILNELSSDVPGVPKIEEERSEEEGTPPSIATMAVPTSIYQTSTGQYIAIAQGGTIQISNPGSDGVQGLQALTMTNSGAPPPGATIVQYAAQSADGTQQFFVPGSQVVVQAATGDMPTYQIRAPTAALPQGVVMAASPGSLHSPQQLAEEATRKRELRLMKNREAARECRRKKKEYVKCLENRVAVLENQNKTLIEELKALKDLYCHKVE

SEQ ID NO: 5877 - protein, 236 aa, Homo sapiens
MSKCARKKYIKTNPRQMTMETVESQHDGSITASLTESKSAHVQTQTGQNSIPALAQVAAIAETDESAESEGVIDSHKRREILSRRPSYRKILNELSSDVPGVPKIEEERSEEEGTPPSIATMAVPTSIYQTSTGQYTATGDMPTYQIRAPTAALPQGVVMAASPGSLHSPQQLAEEATRKRELRLMKNREAARECRRKKKEYVKCLENRVAVLENQNKTLIEELKALKDLYCHKVE

SEQ ID NO: 5878 - protein, 248 aa, Homo sapiens
MSKCARKKYIKTNPRQMTMETVESQHDGSITASLTESKSAHVQTQTGQNSIPALAQVAAIAETDESAESEGVIDSHKRREILSRRPSYRKILNELSSDVPGVPKIEEERSEEEGTPPSIATMAVPTSIYQTSTGQYNEETELAPSHMAAATGDMPTYQIRAPTAALPQGVVMAASPGSLHSPQQLAEEATRKRELRLMKNREAARECRRKKKEYVKCLENRVAVLENQNKTLIEELKALKDLYCHKVE

SEQ ID NO: 5879 - protein, 221 aa, Homo sapiens
MTMETVESQHDGSITASLTESKSAHVQTQTGQNSIPALAQVAAIAETDESAESEGVIDSHKRREILSRRPSYRKILNELSSDVPGVPKIEEERSEEEGTPPSIATMAVPTSIYQTSTGQYTATGDMPTYQIRAPTAALPQGVVMAASPGSLHSPQQLAEEATRKRELRLMKNREAAKECRRRKKEYVKCLESRVAVLEVQNKKLIEELETLKDICSPKTDY

SEQ ID NO: 5880 - protein, 344 aa, Homo sapiens
MQLEIKVALNFIISYLYNKLPRRRADLFGEELERLLKKKYEGHWYPEKPLKGSGFRCVHIGEMVDPVVELAAKRSGLAVEDVRANVPEELSVWIDPFEVSYQIGEKGAVKVLYLDDSEGCGAPELDKEIKSSFNPDAQVFVPIGSQDSSLSNSPSPSFGQSPSPTFIPRSAQPITFTTASFAATKFGSTKMKKGGGAASGGGVASSGAGGQQPPQQPRMARSPTNSLLKHKSLSLSMHSLNFITANPAPQSQLSPNAKEFVYNGGGSPSLFFDAADGQGSGTPGPFGGSGAGTCNSSSFDMAQVFGGGANSLFLEKTPFVEGLSYNLNTMQYPSQQFQPVVLAN

SEQ ID NO: 5881 - protein, 504 aa, Homo sapiens
MFPREKTWNISFAGCGFLGVYYVGVASCLREHAPFLVANATHIYGASAGALTATALVTGVCLGEAGAKFIEVSKEARKRFLGPLHPSFNLVKIIRSFLLKVLPADSHEHASGRLGISLTRVSDGENVIISHFNSKDELIQANVCSGFIPVYCGLIPPSLQGVRYVDGGISDNLPLYELKNTITVSPFSGESDICPQDSSTNIHELRVTNTSIQFNLRNLYRLSKALFPPEPLVLREMCKQGYRDGLRFLQRNGLLNRPNPLLALPPARPHGPEDKDQAVESAQAEDYSQLPGEDHILEHLPARLNEALLEACVEPTDLLTTLSNMLPVRLATAMMVPYTLPLESALSFTIRLLEWLPDVPEDIRWMKEQTGSICQYLVMRAKRKLGRHLPSRLPEQVELRRVQSLPSVPLSCAAYREALPGWMRNNLSLGDALAKWEECQRQLLLGLFCTNVAFPPEALRMRAPADPAPAPADPASPQHQLAGPAPLLSTPAPEARPVIGALGL

SEQ ID NO: 5882 - protein, 128 aa, Homo sapiens
MAAFMLGSLLRTFKQMVPSSASGQVRSHYVDWRMWRDVKRRKMAYEYADERLRINSLRKNTILPKILQDVADEEIAALPRDSCPVRIRNRCVMTSRPRGVKRRWRLSRIVFRHLADHGQLSGIQRATW

SEQ ID NO: 5883 - protein, 1055 aa, Homo sapiens
MTVEQNVLQQSAAQKHQQTFLNQLREITGINDTQILQQALKDSNGNLELAVAFLTAKNAKTPQQEETTYYQTALPGNDRYISVGSQADTNVIDLTGDDKDDLQRAIALSLAESNRAFRETGITDEEQAISRVLEASIAENKACLKRTPTEVWRDSRNPYDRKRQDKAPVGLKNVGNTCWFSAVIQSLFNLLEFRRLVLNYKPPSNAQDLPRNQKEHRNLPFMRELRYLFALLVGTKRKYVDPSRAVEILKDAFKSNDSQQQDVSEFTHKLLDWLEDAFQMKAEEETDEEKPKNPMVELFYGRFLAVGVLEGKKFENTEMFGQYPLQVNGFKDLHECLEAAMIEGEIESLHSENSGKSGQEHWFTELPPVLTFELSRFEFNQALGRPEKIHNKLEFPQVLYLDRYMHRNREITRIKREEIKRLKDYLTVLQQRLERYLSYGSGPKRFPLVDVLQYALEFASSKPVCTSPVDDIDASSPPSGSIPSQTLPSTTEQQGALSSELPSTSPSSVAAISSRSVIHKPFTQSRIPPDLPMHPAPRHITEEELSVLESCLHRWRTEIENDTRDLQESISRIHRTIELMYSDKSMIQVPYRLHAVLVHEGQANAGHYWAYIFDHRESRWMKYNDIAVTKSSWEELVRDSFGGYRNASAYCLMYINDKAQFLIQEEFNKETGQPLVGIETLPPDLRDFVEEDNQRFEKELEEWDAQLAQKALQEKLLASQKLRESETSVTTAQAAGDPEYLEQPSRSDFSKHLKEETIQIITKASHEHEDKSPETVLQSAIKLEYARLVKLAQEDTPPETDYRLHHVVVYFIQNQAPKKIIEKTLLEQFGDRNLSFDERCHNIMKVAQAKLEMIKPEEVNLEEYEEWHQDYRKFRETTMYLIIGLENFQRESYIDSLLFLICAYQNNKELLSKGLYRGHDEELISHYRRECLLKLNEQAAELFESGEDREVNNGLIIMNEFIVPFLPLLLVDEMEEKDILAVEDMRNRWCSYLGQEMEPHLQEKLTDFLPKLLDCSMEIKSFHEPPKLPSYSTHELCERFARIMLSLSRTPADGR

SEQ ID NO: 5884 - protein, 376 aa, Homo sapiens
MDGEEQQPPHEANVEPVVPSEASEPVPRVLSGDPQNLSDVDAFNLLLEMKLKRRRQRPNLPRTVTQLVAEDGSRVYVVGTAHFSDDSKRDVVKTIREVQPDVVVVELCQYRVSMLKMDESTLLREAQELSLEKLQQAVRQNGLMSGLMQMLLLKVSAHITEQLGMAPGGEFREAFKEASKVPFCKFHLGDRPIPVTFKRAIAALSFWQKVRLAWGLCFLSDPISKDDVERCKQKDLLEQMMAEMIGEFPDLHRTIVSERDVYLTYMLRQAARRLELPRASDAEPRKCVPSVVVGVVGMGHVPGIEKNWSTDLNIQEIMTVPPPSVSGRVSRLAVKAAFFGLLGYSLYWMGRRTASLVLSLPAAQYCLQRVTEARHK

SEQ ID NO: 5885 - protein, 1000 aa, Homo sapiens
MPGKLKVKIVAGRHLPVMDRASDLTDAFVEVKFGNTTFKTDVYLKSLNPQWNSEWFKFEVDDEDLQDEPLQITVLDHDTYSANDAIGKVYIDIDPLLYSEAATVISGWFPIYDTIHGIRGEINVVVKVDLFNDLNRFRQSSCGVKFFCTTSIPKCYRAVIIHGFVEELVVNEDPEYQWIDRIRTPRASNEARQRLISLMSGELQRKIGLKVLEMRGNAVVGYLQCFDLEGESGLVVRAIGTACTLDKLSSPAAFLPACNSPSKEMKEIPFNEDPNPNTHSSGPSTPLKNQTYSFSPSKSYSRQSSSSDTDLSLTPKTGMGSGSAGKEGGPFKALLRQQTQSALEQREFPFFTLTAFPPGFLVHVGGVVSARSVKLLDRIHNPDEPETRDAWWAEIRQEIKSHAKALGCHAVVGYSESTSICEEVCILSASGTAAVLNPRFLQDGTVEGCLEQRLEENLPTRCGFCHIPYDELNMPFPAHLTYCYNCRKQKVPDVLFTTIDLPTDATVIGKGCLIQARLCRLKKKAQAEANATAISNLLPFMEYEVHTQLMNKLKLKGMNALFGLRIQITVGENMLMGLASATGVYLAALPTPGGIQIAGKTPNDGSYEQHISHMQKKINDTIAKNKELYEINPPEISEEIIGSPIPEPRQRSRLLRSQSESSDEVTELDLSHGKKDAFVLEIDDTDAMEDVHSLLTDVPPPSGFYSCNTEIMPGINNWTSEIQMFTSVRVIRLSSLNLTNQALNKNFNDLCENLLKSLYFKLRSMIPCCLCHVNFTVSLPEDELIQVTVTAVAITFDKNQALQTTKTPVEKSLQRASTDNEELLQFPLELCSDSLPSHPFPPAKAMTVEKASPVGDGNFRNRSAPPCANSTVGVVKMTPLSFIPGAKITKYLGIINMFFIRETTSLREEGGVSGFLHAFIAEVFAMVRAHVAALGGNAVVSYIMKQCVFMENPNKNQAQCLINVSGDAVVFVRESDLEVVSSQQPTTNCQSSCTEGEVTT

SEQ ID NO: 5886 - protein, 514 aa, Homo sapiens
MVEEVQKHSVHTLVFRSLKRTHDMFVADNGKPVPLDEESHKRKMAIKLRNEYGPVLHMPTSKENLKEKGPQNATDSYVHKQYPANQGQEVEYFVAGTHPYPPGPGVALTADTKIQRMPSESAAQSLAVALPLQTKADANRTAPSGSEYRHPGASDRPQPTAMNSIVMETGNTKNSALMAKKAPTMPKPQWHPPWKLYRVISGHLGWVRCIAVEPGNQWFVTGSADRTIKIWDLASGKLKLSLTGHISTVRGVIVSTRSPYLFSCGEDKQVKCWDLEYNKVIRHYHGHLSAVYGLDLHPTIDVLVTCSRDSTARIWDVRTKASVHTLSGHTNAVATVRCQAAEPQIITGSHDTTIRLWDLVAGKTRVTLTNHKKSVRAVVLHPRHYTFASGSPDNIKQWKFPDGSFIQNLSGHNAIINTLTVNSDGVLVSGADNGTMHLWDWRTGYNFQRVHAAVQPGSLDSESGIFACAFDQSESRLLTAEADKTIKVYREDDTATEETHPVSWKPEIIKRKRF

SEQ ID NO: 5887 - protein, 547 aa, Homo sapiens
MTSAAPAKKPYRKAPPEHRELRLEIPGSRLEQEEPLTDAERMKLLQEENEELRRRLASATRRTEALERELEIGQDCLELELGQSREELDKFKDKFRRLQNSYTASQRTNQELEDKLHTLIKKAEMDRKTLDWEIVELTNKLLDAKNTINKLEELNERYRLDCNPAVQLLKCNKSHFRNHKFADLPCELQDMVRKHLHSGQEAASPGPAPSLAPGAVVPTSVIARVLEKPESLLLNSAQSGSAGRPLAEDVFVHVDMSEGVPGDPASPPAPGSPTPQPNGECHSLGTARGSPEEELPLPAFEKLNPYPTPSPPHPLYPGRRVIEFSEDKVRIPRNSPLPNCTYATRQAISLSLVEEGSERARPSPVPSTPASAQASPHHQPSPAPLTLSAPASSASSEEDLLVSWQRAFVDRTPPPAAVAQRTAFGRDALPELQRHFAHSPADRDEVVQAPSARPEESELLLPTEPDSGFPREEEELNLPISPEEERQSLLPINRGTEEGPGTSHTEGRAWPLPSSSRPQRSPKRMGVHHLHRKDSLTQAQEQGNLLN

SEQ ID NO: 5888 - protein, 299 aa, Homo sapiens
MEHFDASLSTYFKALLGPRDTRVKGWFLLDNYIPTFICSVIYLLIVWLGPKYMRNKQPFSCRGILVVYNLGLTLLSLYMFCELVTGVWEGKYNFFCQGTRTAGESDMKIIRVLWWYYFSKLIEFMDTFFFILRKNNHQITVLHVYHHASMLNIWWFVMNWVPCGHSYFGATLNSFIHVLMYSYYGLSSVPSMRPYLWWKKYITQGQLLQFVLTIIQTSCGVIWPCTFPLGWLYFQIGYMISLIALFTNFYIQTYNKKGASRRKDHLKDHQNGSMAAVNGHTNSFSPLENNVKPRKLRKD

SEQ ID NO: 5889 - protein, 623 aa, Homo sapiens
MEHAVAPCVLYPGTEPGAAGESESEGAASPAQTPCSLGASLCFSSGEESPPQSLASAAEGAATSPPSSGGPRVVERQWEAGSAGAASPEELASPEERACPEEPAAPSPEPRVWLEDPASPEEPGEPAPVPPGFGAVYGEPDLVLEVSGRRLRAHKAVLAARSDYFRARASRDVLRVQGVSLTALRLLLADAYSGRMAGVRPDNVAEVVAGARRLQLPGAAQRATDAVGPQLSLANCYEVLSAAKRQRLNELRDAAYCFMSDHYLEVLREPAVFGRLSGAERDLLLRRRLRAGRAHLLAAALGPAGERAGSRPQSPSGDADARGDAAVYCFHAAAGEWRELTRLPEGAPARGCGLCVLYNYLFVAGGVAPAGPDGRARPSDQVFCYNPATDSWSAVRPLRQARSQLRLLALDGHLYAVGGECLLSVERYDPRADRWAPVAPLPRGAFAVAHEATTCHGEIYVSGGSLFYRLLKYDPRRDEWQECPCSSSRERSADMVALDGFIYRFDLSGSRGEAQAAGPSGVSVSRYHCLAKQWSPCVAPLRLPGGPTGLQPFRCAALDGAIYCVSRAGTWRFQPAREGEAGGDAGQGGGFEALGAPLDVRGVLIPFALSLPEKPPRGEQGAP

SEQ ID NO: 5890 - protein, 482 aa, Homo sapiens
MPPSPLDDRVVVALSRPVRPQDLNLCLDSSYLGSANPGSNSHPPVIATTVVSLKAANLTYMPSSSGSARSLNCGCSSASCCTVATYDKDNQAQTQAIAAGTTTTAIGTSTTCPANQMVNNNENTGSLSPSSGVGSPVSGTPKQLASIKIIYPNDLAKKMTKCSKSHLPSQGPVIIDCRPFMEYNKSHIQGAVHINCADKISRRRLQQGKITVLDLISCREGKDSFKRIFSKEIIVYDENTNEPSRVMPSQPLHIVLESLKREGKEPLVLKGGLSSFKQNHENLCDNSLQLQECREVGGGASAASSLLPQPIPTTPDIENAELTPILPFLFLGNEQDAQDLDTMQRLNIGYVINVTTHLPLYHYEKGLFNYKRLPATDSNKQNLRQYFEEAFEFIEEAHQCGKGLLIHCQAGVSRSATIVIAYLMKHTRMTMTDAYKFVKGKRPIISPNLNFMGQLLEFEEDLNNGVTPRILTPKLMGVETVV

SEQ ID NO: 5891 - protein, 140 aa, Homo sapiens
MQRLNIGYVINVTTHLPLYHYEKGLFNYKRLPATDSNKQNLRQYFEEAFEFIEEAHQCGKGLLIHCQAGVSRSATIVIAYLMKHTRMTMTDAYKFVKGKRPIISPNLNFMGQLLEFEEDLNNGVTPRILTPKLMGVETVV

SEQ ID NO: 5892 - protein, 140 aa, Homo sapiens; identical to SEQ ID NO: 5891

SEQ ID NO: 5893 - protein, 154 aa, Homo sapiens
MAENSGRAGKSSGSGAGKGAVSAEQVIAGFNRLRQEQRGLASKAAELEMELNEHSLVIDTLKEVDETRKCYRMVGGVLVERTVKEVLPALENNKEQIQKIIETLTQQLQAKGKELNEFREKHNIRLMGEDEKPAAKENSEGAGAKASSAGVLVS

SEQ ID NO: 5894 - protein, 204 aa, Homo sapiens
MGLGAVPGRQAAFREGLEQAVRYAKALGCPRIHLMAGRVPQGADRIAVKAEMEAVFLENLRHAAGVLAQEDLVGLLEPINTRITDPQYFLDTPQQAAAILQKVGRPNLQLQMDIFHWQIMDGNLTGNIREFLPIVGHVQVAQVPGRGEPSSPGELNFPYLFQLLEDEGYKGFVGCEYQPRGDTVEGLSWLRSYWDRRGHPEAGQ

SEQ ID NO: 5895 - protein, 941 aa, Homo sapiens
MNKKKKPFLGMPAPLGYVPGLGRGATGFTTRSDIGPARDANDPVDDRHAPPGKRTVGDQMKKNQAADDDDEDLNDTNYDEFNGYAGSLFSSGPYEKDDEEADAIYAALDKRMDERRKERREQREKEEIEKYRMERPKIQQQFSDLKRKLAEVTEEEWLSIPEVGDARNKRQRNPRYEKLTPVPDSFFAKHLQTGENHTSVDPRQTQFGGLNTPYPGGLNTPYPGGMTPGLMTPGTGELDMRKIGQARNTLMDMRLSQVSDSVSGQTVVDPKGYLTDLNSMIPTHGGDINDIKKARLLLKSVRETNPHHPPAWIASARLEEVTGKLQVARNLIMKGTEMCPKSEDVWLEAARLQPGDTAKAVVAQAVRHLPQSVRIYIRAAELETDIRAKKRVLRKALEHVPNSVRLWKAAVELEEPEDARIMLSRAVECCPTSVELWLALARLETYENARKVLNKARENIPTDRHIWITAAKLEEANGNTQMVEKIIDRAITSLRANGVEINREQWIQDAEECDRAGSVATCQAVMRAVIGIGIEEEDRKHTWMEDADSCVAHNALECARAIYAYALQVFPSKKSVWLRAAYFEKNHGTRESLEALLQRAVAHCPKAEVLWLMGAKSKWLAGDVPAARSILALAFQANPNSEEIWLAAVKLESENDEYERARRLLAKARSSAPTARVFMKSVKLEWVQDNIRAAQDLCEEALRHYEDFPKLWMMKGQIEEQKEMMEKAREAYNQGLKKCPHSTPLWLLLSRLEEKIGQLTRARAILEKSRLKNPKNPGLWLESVRLEYRAGLKNIANTLMAKALQECPNSGILWSEAIFLEARPQRRTKSVDALKKCEHDPHVLLAVAKLFWSQRKITKAREWFHRTVKIDSDLGDAWAFFYKFELQHGTEEQQEEVRKRCESAEPRHGELWCAVSKDIANWQKKIGDILRLVAGRIKNTF

SEQ ID NO: 5896 - protein, 490 aa, Homo sapiens
MAQRAVWLISHEPGTPLCGTVRFSRRYPTVEKRARVFNGASYVPVPEDGPFLKALLFELRLLDDDKDFVESRDSCSRINKTSIYGLLIGGEELWPVVAFLKNDMIYACVPLVEQTLSPRPPLISVSGVSQGFEFLFGIQDFLYSGQKNDSELNTKLSQLPDLLLQACPFGTLLDANLQNSLDNTNFASVTQPQKQPAWKTGTYKGKPQVSISITEKVKSMQYDKQGIADTWQVVGTVTCKCDLEGIMPNVTISLSLPTNGSPLQDILVHPCVTSLDSAILTSSSIDAMDDSAFSGPYKFPFTPPLESFNLCFYTSQVPAPPILGFYQMKEEEVQLRITINLKLHESVKNNFEFCEAHIPFYNRGPITHLEYKTSFGQLEVFREKSLLIWIIGQKFPKSMEISLSGTVTFGAKSHEKQPFDPICTGETAYLKLHFRILDYTLTGCYADQHSVQVFASGKPKISAHRKLISSDYYIWNSKAPAPVTYGSLLL

SEQ ID NO: 5897 - protein, 896 aa, Homo sapiens
MAAAAQLSLTQLSSGNPVYEKYYRQVDTGNTGRVLASDAAAFLKKSGLPDLILGKIWDLADTDGKGILNKQEFFVALRLVACAQNGLEVSLSSLNLAVPPPRFHDTSSPLLISGTSAAELPWAVKPEDKAKYDAIFDSLSPVNGFLSGDKVKPVLLNSKLPVDILGRVWELSDIDHDGMLDRDEFAVAMFLVYCALEKEPVPMSLPPALVPPSKRKTWVVSPAEKAKYDEIFLKTDKDMDGFVSGLEVREIFLKTGLPSTLLAHIWSLCDTKDCGKLSKDQFALAFHLISQKLIKGIDPPHVLTPEMIPPSDRASLQKNIIGSSPVADFSAIKELDTLNNEIVDLQREKNNVEQDLKEKEDTIKQRTSEVQDLQDEVQRENTNLQKLQAQKQQVQELLDELDEQKAQLEEQLKEVRKKCAEEAQLISSLKAELTSQESQISTYEEELAKAREELSRLQQETAELEESVESGKAQLEPLQQHLQDSQQEISSMQMKLMEMKDLENHNSQLNWCSSPHSILVNGATDYCSLSTSSSETANLNEHVEGQSNLESEPIHQESPARSSPELLPSGVTDENEVTTAVTEKVCSELDNNRHSKEEDPFNVDSSSLTGPVADTNLDFFQSDPFVGSDPFKDDPFGKIDPFGGDPFKGSDPFASDCFFRQSTDPFATSSTDPFSAANNSSITSVETLKHNDPFAPGGTVVAASDSATDPFASVFGNESFGGGFADFSTLSKVNNEDPFRSATSSSVSNVVITKNVFEETSVKSEDEPPALPPKIGTPTRPCPLPPGKRSINKLDSPDPFKLNDPFQPFPGNDSPKEKDPEIFCDPFTSATTTTNKEADPSNFANFSAYPSEEDMIEWAKRESEREEEQRLARLNQQEQEDLELAIALSKSEISEA

SEQ ID NO: 5898 - protein, 548 aa, Homo sapiens
MRLRNGTFLTLLLFCLCAFLSLSWYAALSGQKGDVVDVYQREFLALRDRLHAAEQESLKRSKELNLVLDEIKRAVSERQALRDGDGNRTWGRLTEDPRLKPWNGSHRHVLHLPTVFHHLPHLLAKESSLQPAVRVGQGRTGVSVVMGIPSVRREVHSYLTDTLHSLISELSPQEKEDSVIVVLIAETDSQYTSAVTENIKALFPTEIHSGLLEVISPSPHFYPDFSRLRESFGDPKERVRWRTKQNLDYCFLMMYAQSKGIYYVQLEDDIVAKPNYLSTMKNFALQQPSEDWMILEFSQLGFIGKMFKSLDLSLIVEFILMFYRDKPIDWLLDHILWVKVCNPEKDAKHCDRQKANLRIRFKPSLFQHVGTHSSLAGKIQKLKDKDFGKQALRKEHVNPPAEVSTSLKTYQHFTLEKAYLREDFFWAFTPAAGDFIRFRFFQPLRLERFFFRSGNIEHPEDKLFNTSVEVLPFDNPQSDKEALQEGRTATLRYPRSPDGYLQIGSFYKGVAEGEVDPAFGPLEALRLSIQTDSPVWVILSEIFLKKAD

SEQ ID NO: 5899 - protein, 563 aa, Homo sapiens
MSRVAGTRTDVNELLQRWTPRCVRWHTGGARRVALDRPLVTACLPPAGDVVDVYQREFLALRDRLHAAEQESLKRSKELNLVLDEIKRAVSERQALRDGDGNRTWGRLTEDPRLKPWNGSHRHVLHLPTVFHHLPHLLAKESSLQPAVRVGQGRTGVSVVMGIPSVRREVHSYLTDTLHSLISELSPQEKEDSVIVVLIAETDSQYTSAVTENIKALFPTEIHSGLLEVISPSPHFYPDFSRLRESFGDPKERVRWRTKQNLDYCFLMMYAQSKGIYYVQLEDDIVAKPNYLSTMKNFALQQPSEDWMILEFSQLGFIGKMFKSLDLSLIVEFILMFYRDKPIDWLLDHILWVKVCNPEKDAKHCDRQKANLRIRFKPSLFQHVGTHSSLAGKIQKLKDKDFGKQALRKEHVNPPAEVSTSLKTYQHFTLEKAYLREDFFWAFTPAAGDFIRFRFFQPLRLERFFFRSGNIEHPEDKLFNTSVEVLPFDNPQSDKEALQEGRTATLRYPRSPDGYLQIGSFYKGVAEGEVDPAFGPLEALRLSIQTDSPVWVILSEIFLKKAD

SEQ ID NO: 5900 - protein, 416 aa, Homo sapiens
MEERPAETNANVDNSASPSVAQLAGRFREQAAAAKETPASKPTRRKPACSLPLFPPKVDLGQNGEEKSPPNASQPPKFKVKSSPLIEKLQANLTFEPAALLPGASPKSPGLKAMVSPFHSPPSTPSSPGVRSRPSEAEEVPVSFDQPPEGSHLPCYNKVRTRGSIKRRPPSRRFRRSQSDCGELGDFRAVESSQQNGAKEEDGDEVLPSKSKAPGSPLSSEGAAGEGVRTLGPAEKPPLRRSPSRTEKQEEDRATEEAKNGEKARRSSEEVDGQHPAQEEVPESPQTSGPEAENRCGSPREEKPAGEEAEMEKATEVKGERVQNEEVGPEHDSQETKKLEEGAAVKETPHSPPGGVKGGDVPKQEKGKEKQQEGAVLEPGCSPQTGPAQLETSSEVQSEPAVPKPEDDTPVQDTKM

SEQ ID NO: 5901 - protein, 180 aa, Homo sapiens
MNTVLSRANSLFAFSLSVMAALTFGCFITTAFKDRSVPVRLHVSRIMLKNVEDFTGPRERSDLGFITFDITADLENIFDWNVKQLFLYLSAEYSTKNNALNQVVLWDKIVLRGDNPKLLLKDMKTKYFFFDDGNGLKGNRNVTLTLSWNVVPNAGILPLVTGSGHVSVPFPDTYEITKSY

SEQ ID NO: 5902 - protein, 454 aa, Homo sapiens
MAEFSQKRGKRRSDEGLGSMVDFLLANARLVLGVGGAAVLGIATLAVKRFIDRATSPRDEDDTKADSWKELSLLKATPHLQPRPPPAALSQPVLPLAPSSSAPEGPAETDPEVTPQLSSPAPLCLTLQERLLAFERDRVTIPAAQVALAKQLAGDIALELQAYFRSKFPELPFGAFVPGGPLYDGLQAGAADHVRLLVPLVLEPGLWSLVPGVDTVARDPRCWAVRRTQLEFCPRGSSPWDRFLVGGYLSSRVLLELLRKALAASVNWPAIGSLLGCLIRPSMASEELLLEVQHERLELTVAVLVAVPGVDADDRLLLAWPLEGLAGNLWLQDLYPVEAARLRALDDHDAGTRRRLLLLLCAVCRGCSALGQLGRGHLTQVVLRLGEDNVDWTEEALGERFLQALELLIGSLEQASLPCHFNPSVNLFSSLREEEIDDIGYALYSGLQEPEGLL

SEQ ID NO: 5903 - protein, 454 aa, Homo sapiens; identical to SEQ ID NO: 5902

SEQ ID NO: 5904 - protein, 530 aa, Homo sapiens
MRRLWGAARKPSGAGWEKEWAEAPQEAPGAWSGRLGPGRSGRKGRAVPGWASWPAHLALAARPARHLGGAGQGPRPLHSGTAPFHSRASGERQRRLEPQLQHESRCRSSTPADAWRAEAALPVRAMGAPWGSPTAAAGGRRGWRRGRGLPWTVCVLAAAGLTCTALITYACWGQLPPLPWASPTPSRPVGVLLWWEPFGGRDSAPRPPPDCRLRFNISGCRLLTDRASYGEAQAVLFHHRDLVKGPPDWPPPWGIQAHTAEEVDLRVLDYEEAAAAAEALATSSPRPPGQRWVWMNFESPSHSPGLRSLASNLFNWTLSYRADSDVFVPYGYLYPRSHPGDPPSGLAPPLSRKQGLVAWVVSHWDERQARVRYYHQLSQHVTVDVFGRGGPGQPVPEIGLLHTVARYKFYLAFENSQHLDYITEKLWRNALLAGAVPVVLGPDRANYERFVPRGAFIHVDDFPSASSLASYLLFLDRNPAVYRRYFHWRRSYAVHITSFWDEPWCRVCQAVQRAGDRPKSIRNLASWFER

SEQ ID NO: 5905 - protein, 574 aa, Homo sapiens
MEPNSLRTKVPAFLSDLGKATLRGIRKCPRCGTYNGTRGLSCKNKTCGTIFRYGARKQPSVEAVKIITGSDLQVYSVRQRDRGPDYRCFVELGVSETTIQTVDGTIITQLSSGRCYVPSCLKAATQGVVENQCQHIKLAVNCQAEATPLTLKSSVLNAMQASPETKQTIWQLATEPTGPLVQRITKNILVVKCKASQKHSLGYLHTSFVQKVSGKSLPERRFFCSCQTLKSHKSNASKDETAQRCIHFFACICAFASDETLAQEFSDFLNFDSSGLKEIIVPQLGCHSESTVSACESTASKSKKRRKDEVSGAQMNSSLLPQDAVSSNLRKSGLKKPVVASSLKRQACGQLLDEAQVTLSFQDWLASVTERIHQTMHYQFDGKPEPLVFHIPQSFFDALQQRISIGSAKKRLPNSTTAFVRKDALPLGTFSKYTWHITNILQVKQILDTPEMPLEITRSFIQNRDGTYELFKCPKVEVESIAETYGRIEKQPVLRPLELKTFLKVGNTSPDQKEPTPFIIEWIPDILPQSKIGELRIKFEYGHHRNGHVAEYQDQRPPLDQPLELAPLTTITFP

SEQ ID NO: 5906 - protein, 599 aa, Homo sapiens
MGPKRRQLTFREKSRIIQEVEENPDLRKGEIARRFNIPPSTLSTILKNKRAILASERKYGVASTCRKTNKLSPYDKLEGLLIAWFQQIRAAGLPVKGIILKEKALRIAEELGMDDFTASNGWLDRFRRRHGVVSCSGVARARARNAAPRTPAAPASPAAVPSEGSGGSTTGWRAREEQPPSVAEGYASQDVFSATETSLWYDFLPDQAAGLCGGDGRPRQATQRLSVLLCANADGSEKLPPLVAGKSAKPRAGQAGLPCDYTANSKGGVTTQALAKYLKALDTRMAAESRRVLLLAGRLAAQSLDTSGLRHVQLAFFPPGTVHPLERGVVQQVKGHYRQAMLLKAMAALEGQDPSGLQLGLTEALHFVAAAWQAVEPSDIAACFREAGFGGGPNATITTSLKSEGEEEEEEEEEEEEEEGEGEEEEEEGEEEEEEGGEGEELGEEEEVEEEGDVDSDEEEEEDEESSSEGLEAEDWAQGVVEAGGSFGAYGAQEEAQCPTLHFLEGGEDSDSDSEEEDDEEEDDEDEDDDDDEEDGDEVPVPSFGEAMAYFAMVKRYLTSFPIDDRVQSHILHLEHDLVHVTRKNHARQAGVRGLGHQS

SEQ ID NO: 5907 - protein, 547 aa, Homo sapiens
MSTASSSSSSSSSQTPHPPSQRMRRSAAGSPPAVAAAGSGNGAGGGGGVGCAPAAGAGRLLQPIRATVPYQLLRGSQHSPTRPPVAAAAASLGSLPGPGAARGPSPSSPTPPAAAAPAEQAPRAKGRPRRSPESHRRSSSPERRSPGSPVCRADKAKSQQVRTSSTIRRTSSLDTITGPYLTGQWPRDPHVHYPSCMKDKATQTPSCWAEEGAEKRSHQRSASWGSADQLKEQIAKLRQQLQRSKQSSRHSKEKDRQSPLHGNHITISHTQATGSRSVPMPLSNISVPKSSVSRVPCNVEGISPELEKVFIKENNGKEEVSKPLDIPDGRRAPLPAHYRSSSTRSIDTQTPSVQERSSSCSSHSPCVSPFCPPESQDGSPCSTEDLLYDRDKDSGSSSPLPKYASSPKPNNSYMFKREPPEGCERVKVFEEMASRQPISAPLFSCPDKNKVNFIPTGSAFCPVKLLGPLLPASDLMLKNSPNSGQSSALATLTVEQLSSRVSFTSLSDDTSTAGSMEASVQQPSQQQQLLQELQGEDHISAQNYVII

SEQ ID NO: 5908 - protein, 377 aa, Homo sapiens
MSEVKSRKKSGPKGAPAAEPGKRSEGGKTPVARSSGGGGWADPRTCLSLLSLGTCLGLAWFVFQQSEKFAKVENQYQLLKLETNEFQQLQSKISLISEKLESTESILQEATSSMSLMTQFEQEVSNLQDIMHDIQNNEEVLTQRMQSLNEKFQNITDFWKRSLEEMNINTDIFKSEAKHIHSQVTVQINSAEQEIKLLTERLKDLEDSTLRNIRTVKRQEEEDLLRVEEQLGSDTKAIEKLEEEQHALFARDEDLTNKLSDYEPKVEECKTHLPTIESAIHSVLRVSQDLIETEKKMEDLTMQMFNMEDDMLKAVSEIMEMQKTLEGIQYDNSILKMQNELDILKEKVHDFIAYSSTGEKGTLKEYNIENKGIGGDF

SEQ ID NO: 5909 - protein, 350 aa, Homo sapiens
MSEVKSRKKSGPKGAPAAEPGKRSEGGKTPVARSSGGGGWADPRTCLSLLSLGTCLGLAWFVFQQSEKFAKVENQYQLLKLETNEFQQLQSKISLISEKWQKSEAIMEQLKSFQIIAHLKRLQEEINEVKTWSNRITEKQDILNNSLTTLSQDITKVDQSTTSMAKDVGLKITSVKTDIRRISGLVTDVISLTDSVQELENKIEKVEKNTVKNIGDLLSSSIDRTATLRKTASENSQRINSVKKTLTELKSDFDKHTDRFLSLEGDRAKVLKTVTFANDLKPKVYNLKKDFSRLEPLVNDLTLRIGRLVTDLLQREKEIAFLSEKISNLTIVQAEIKDIKDEIAHISDMN

SEQ ID NO: 5910 - protein, 70 aa, Homo sapiens
MSEVKSRKKSGPKGAPAAEPGKRSEGGKTPVARSSGGGGWADPRTCLSLLSLGTCLGLACGRNLKLSWNN

SEQ ID NO: 5911 - protein, 244 aa, Homo sapiens
MEQLKSFQIIAHLKRLQEEINEVKTWSNRITEKQDILNNSLTTLSQDITKVDQSTTSMAKDVGLKITSVKTDIRRISGLVTDVISLTDSVQELENKIEKVEKNTVKNIGDLLSSSIDRTATLRKTASENSQRINSVKKTLTELKSDFDKHTDRFLSLEGDRAKVLKTVTFANDLKPKVYNLKKDFSRLEPLVNDLTLRIGRLVTDLLQREKEIAFLSEKISNLTIVQAEIKDIKDEIAHISDMN

SEQ ID NO: 5912 - protein, 280 aa, Homo sapiens
MAAVVALSLRRRLPATTLGGACLQASRGAQTAAATAPRIKKFAIYRWDPDKAGDKPHMQTYKVDLNKCGPMVLDALIKIKNEVDSTLTFRRSCREGICGSCAMNINGGNTLACTRRIDTNLNKVSKIYPLPHMYVIKDLVPDLSNFYAQYKSIEPYLKKKDESQEGKQQYLQSIEEREKLDGLYECILCACCSTSCPSYWWNGDKYLGPAVLMQAYRWMIDSRDDFTEERLAKLQDPFSLYRCHTIMNCTRTCPKGLNPGKAIAEIKKMMATYKEKKASV

SEQ ID NO: 5913 - protein, 226 aa, Homo sapiens
MSWVQAASLIQGPGDKGDVFDEEADESLLAQREWQSNMQRRVKEGYRDGIDAGKAVTLQQGFNQGYKKGAEVILNYGRLRGTLSALLSWCHLHNNNSTLINKINNLLDAVGQCEEYVLKHLKSITPPSHVVDLLDSIEDMDLCHVVPAEKKIDEAKDERLCENNAEFNKNCSKSHSGIDCSYVECCRTQEHAHSENPSPTWILEQTASLVKQLGLSVDVLQHLKQL

SEQ ID NO: 5914 - protein, 890 aa, Homo sapiens
MEYEWKPDEQGLQQILQLLKESQSPDTTIQRTVQQKLEQLNQYPDFNNYLIFVLTKLKSEDEPTRSLSGLILKNNVKAHFQNFPNGVTDFIKSECLNNIGDSSPLIRATVGILITTIASKGELQNWPDLLPKLCSLLDSEDYNTCEGAFGALQKICEDSAEILDSDVLDRPLNIMIPKFLQFFKHSSPKIRSHAVACVNQFIISRTQALMLHIDSFIENLFALAGDEEPEVRKNVCRALVMLLEVRMDRLLPHMHNIVEYMLQRTQDQDENVALEACEFWLTLAEQPICKDVLVRHLPKLIPVLVNGMKYSDIDIILLKGDVEEDETIPDSEQDIRPRFHRSRTVAQQHDEDGIEEEDDDDDEIDDDDTISDWNLRKCSAAALDVLANVYRDELLPHILPLLKELLFHHEWVVKESGILVLGAIAEGCMQGMIPYLPELIPHLIQCLSDKKALVRSITCWTLSRYAHWVVSQPPDTYLKPLMTELLKRILDSNKRVQEAACSAFATLEEEACTELVPYLAYILDTLVFAFSKYQHKNLLILYDAIGTLADSVGHHLNKPEYIQMLMPPLIQKWNMLKDEDKDLFPLLECLSSVATALQSGFLPYCEPVYQRCVNLVQKTLAQAMLNNAQPDQYEAPDKDFMIVALDLLSGLAEGLGGNIEQLVARSNILTLMYQCMQDKMPEVRQSSFALLGDLTKACFQHVKPCIADFMPILGTNLNPEFISVCNNATWAIGEISIQMGIEMQPYIPMVLHQLVEIINRPNTPKTLLENTAITIGRLGYVCPQEVAPMLQQFIRPWCTSLRNIRDNEEKDSAFRGICTMISVNPSGVIQDFIFFCDAVASWINPKDDLRDMFCKILHGFKNQVGDENWRRFSDQFPLPLKERLAAFYGV

SEQ ID NO: 5915 - protein, 890 aa, Homo sapiens; identical to SEQ ID NO: 5914

SEQ ID NO: 5916 - protein, 1045 aa, Homo sapiens
MGSQPPLGSPLSREEGEAPPPAPASEGRRRSRRVRLRGSCRHRPSFLGCRELAASAPARPAPASSEIMASAAKEFKMDNFSPKAGTSKLQQTVPADASPDSKCPICLDRFDNVSYLDRCLHKFCFRCVQEWSKNKAECPLCKQPFDSIFHSVRAEDDFKEYVLRPSYNGSFVTPDRRFRYRTTLTRERNASVYSPSGPVNRRTTTPPDSGVLFEGLGISTRPRDVEIPQFMRQIAVRRPTTADERSLRKIQEQDIINFRRTLYRAGARVRNIEDGGRYRDISAEFFRRNPACLHRLVPWLKRELTVLFGAHGSLVNIVQHIIMSNVTRYDLESQAFVSDLRPFLLNRTEHFIHEFISFARSPFNMAAFDQHANYDCPAPSYEEGSHSDSSVITISPDEAETQELDINVATVSQAPWDDETPGPSYSSSEQVHVTMSSLLNTSDSSDEELVTGGATSQIQGVQTNDDLNNDSDDSSDNCVIVGFVKPLAERTPELVELSSDSEDLGSYEKMETVKTQEQEQSYSSGDSDVSRCSSPHSVLGKDEQINKGHCDSSTRIKSKKEEKRSTSLSSPRNLNSSVRGDRVYSPYNHRHRKRGRSRSSDSRSQSRSGHDQKNHRKHHGKKRMKSKRSRSRESSRPRGRRDKKRSRTRDSSWSRRSQTLSLSSESTSRSRSRSSDHGKRRSRSRNRDRYYLRNNYGSRYKWEYTYYSRNKDRDGYESSYRRRTLSRAHYSRQSSSPEFRVQSFSERTNARKKNNHSERKYYYYERHRSRSLSSNRSRTASTGTDRVRNEKPGGKRKYKTRHLEGTNEVAQPSREFASKAKDSHYQKSSSKLDGNYKNESDTFSDSRSSDRETKHKRRKRKTRSLSVEIVYEGKATDTTKHHKKKKKKHKKKHKKHHGDNASRSPVVITIDSDSDKDSEVKEDTECDNSGPQDPLQNEFLAPSLEPFETKDVVTIEAEFGVLDKECDIATLSNNLNNANKTVDNIPPLAASVEQTLDVREESTFVSDLENQPSNIVSLQTEPSRQLPSPRTSLMSVCLGRDCDMS

SEQ ID NO: 5917 - protein, 125 aa, Homo sapiens
MDDVESSEEEEEEDEKLERVPSPDHRRRSYRDLDKPRRSPTLRYRRSRSRSPRRRSRSPKRRSPSPRRERHRSKSPRRHRSRSRDRRHRSRSKSPGHHRSHRHRSHSKSPERSKKSHKKSRRGNE

SEQ ID NO: 5918 - protein, 312 aa, Homo sapiens
MANRTVKDAHSIHGTNPQYLVEKIIRTRIYESKYWKEECFGLTAELVVDKAMELRFVGGVYGGNIKPTPFLCLTLKMLQIQPEKDIIVEFIKNEDFKYVRMLGALYMRLTGTAIDCYKYLEPLYNDYRKIKSQNRNGEFELMHVDEFIDELLHSERVCDIILPRLQKRYVLEEAEQLEPRVSALEEDMDDVESSEEEEEEDEKLERVPSPDHRRRSYRDLDKPRRSPTLRYRRSRSRSPRRRSRSPKRRSPSPRRERHRSKSPRRHRSRSRDRRHRSRSKSPGHHRSHRHRSHSKSPERSKKSHKKSRRGNE

SEQ ID NO: 5919 - protein, 859 aa, Homo sapiens
MYSGAGPALAPPAPPPPIQGYAFKPPPRPDFGTSGRTIKLQANFFEMDIPKIDIYHYELDIKPEKCPRRVNREIVEHMVQHFKTQIFGDRKPVFDGRKNLYTAMPLPIGRDKVELEVTLPGEGKDRIFKVSIKWVSCVSLQALHDALSGRLPSVPFETIQALDVVMRHLPSMRYTPVGRSFFTASEGCSNPLGGGREVWFGFHQSVRPSLWKMMLNIDVSATAFYKAQPVIEFVCEVLDFKSIEEQQKPLTDSQRVKFTKEIKGLKVEITHCGQMKRKYRVCNVTRRPASHQTFPLQQESGQTVECTVAQYFKDRHKLVLRYPHLPCLQVGQEQKHTYLPLEVCNIVAGQRCIKKLTDNQTSTMIRATARSAPDRQEEISKLMRSASFNTDPYVREFGIMVKDEMTDVTGRVLQPPSILYGGRNKAIATPVQGVWDMRNKQFHTGIEIKVWAIACFAPQRQCTEVHLKSFTEQLRKISRDAGMPIQGQPCFCKYAQGADSVEPMFRHLKNTYAGLQLVVVILPGKTPVYAEVKRVGDTVLGMATQCVQMKNVQRTTPQTLSNLCLKINVKLGGVNNILLPQGRPPVFQQPVIFLGADVTHPPAGDGKKPSIAAVVGSMDAHPNRYCATVRVQQHRQEIIQDLAAMVRELLIQFYKSTRFKPTRIIFYRDGVSEGQFQQVLHHELLAIREACIKLEKDYQPGITFIVVQKRHHTRLFCTDKNERVGKSGNIPAGTTVDTKITHPTEFDFYLCSHAGIQGTSRPSHYHVLWDDNRFSSDELQILTYQLCHTYVRCTRSVSIPAPAYYAHLVAFRARYHLVDKEHDSAEGSHTSGQSNGRDHQALAKAVQVHQDTLRTMYFA

SEQ ID NO: 5920 - protein, 117 aa, Homo sapiens
MKWMFKEDHSLEHRCVESAKIRAKYPDRVPVIVEKVSGSQIVDIDKRKYLVPSDITVAQFMWIIRKRIQLPSEKAIFLFVDKTVPQSSLTMGQLYEKEKDEDGFLYVAYSGENTFGF

SEQ ID NO: 5921 - protein, 398 aa, Homo sapiens
MDGVTPTLSTIRGRTLESSTLHVTPRSLDRNKDQITNIFSGFAGLLAILLVVAVFCILWNWNKRKKRQVPYLRVTVMPLLTLPQTRQRAKNIYDILPWRQEDLGRHESRSMRIFSTESLLSRNSESPEHVPSQAGNAFQEHTAHIHATEYAVGIYDNAMVPQMCGNLTPSAHCINVRASRDCASISSEDSHDYVNVPTAEEIAETLASTKSPSRNLFVLPSTQKLEFTEERDEGCGDAGDCTSLYSPGAEDSDSLSNGEGSSQISNDYVNMTGLDLSAIQERQLWVAFQCCRDYENVPAADPSGSQQQAEKDVPSSNIGHVEDKTDDPGTHVQCVKRTFLASGDYADFQPFTQSEDSQMKHREEMSNEDSSDYENVLTAKLGGRDSEQGPGTQLLPDE

SEQ ID NO: 5922 - protein, 900 aa, Homo sapiens
MRLFVSDGVPGCLPVLAAAGRARGRAEVLISTVGPEDCVVPFLTRPKVPVLQLDSGNYLFSTSAICRYFFLLSGWEQDDLTNQWLEWEATELQPALSAALYYLVVQGKKGEDVLGSVRRALTHIDHSLSRQNCPFLAGETESLADIVLWGALYPLLQDPAYLPEELSALHSWFQTLSTQEPCQRAAETVLKQQGVLALRPYLQKQPQPSPAEGRAVTNEPEEEELATLSEEEIAMAVTAWEKGLESLPPLRPQQNPVLPVAGERNVLITSALPYVNNVPHLGNIIGCVLSADVFARYSRLRQWNTLYLCGTDEYGTATETKALEEGLTPQEICDKYHIIHADIYRWFNISFDIFGRTTTPQQTKITQDIFQQLLKRGFVLQDTVEQLRCEHCARFLADRFVEGVCPFCGYEEARGDQCDKCGKLINAVELKKPQCKVCRSCPVVQSSQHLFLDLPKLEKRLEEWLGRTLPGSDWTPNAQFITRSWLRDGLKPRCITRDLKWGTPVPLEGFEDKVFYVWFDATIGYLSITANYTDQWERWWKNPEQVDLYQFMAKDNVPFHSLVFPCSALGAEDNYTLVSHLIATEYLNYEDGKFSKSRGVGVFGDMAQDTGIPADIWRFYLLYIRPEGQDSAFSWTDLLLKNNSELLNNLGNFINRAGMFVSKFFGGYVPEMVLTPDDQRLLAHVTLELQHYHQLLEKVRIRDALRSILTISRHGNQYIQVNEPWKRIKGSEADRQRAGTVTGLAVNIAALLSVMLQPYMPTVSATIQAQLQLPPPACSILLTNFLCTLPAGHQIGTVSPLFQKLENDQIESLRQRFGGGQAKTSPKPAVVETVTTAKPQQIQALMDEVTKQGNIVRELKAQKADKNEVAAEVAKLLDLKKQLAVAEGKPPEAPKGKKKK

SEQ ID NO: 5923 - protein, 552 aa, Homo sapiens
MLALKAAFGEALFTAQDEALLLRRLTLAAQHPALPPPTHLFYLHCVLSFPENWPLGPEGEEAAPLLLGPQLCRGLLPSLLHDPMALLARLHLLCLLCAEEEEEEKGQLPSPRHYLEELLAGLRQRAALDGGPRALATLCFQASYLVACCLAGQPTVLTPLIHGLAQLYQARPMLAPHFVDLLDQVDSELREPLKVVLRQVVVSRPGRDEALCWHLQMLAKVADGDAQSATLNFLQAAAAHCTNWDLQQGLLRVCRALLRAGVRGGLVDLLQVLARQLEDPDGRDHARLYYILLAHLAAPKLGVALGPSLAAPALASSLVAENQGFVAALMVQEAPALVRLSLGSHRVKGPLPVLKLQPEALEPIYSLELRFRVEGQLYAPLEAVHVPCLCPGRPARPLLLPLQPRCPAPARLDVHALYTTSTGLTCHAHLPPLFVNFADLFLPFPQPPEGAGLGFFEELWDSCLPEGAESRVWCPLGPQGLEGLVSRHLEPFVVVAQPPTSYCVAIHLPPDSKLLLRLEAALADGVPVALRTDDWAVLPLAGDYLRGLAAAV

SEQ ID NO: 5924 - protein, 201 aa, Homo sapiens
MRLLPLLRTVLWAAFLGSPLRGGSSLRHVVYWNSSNPRLLRGDAVVELGLNDYLDIVCPHYEGPGPPEGPETFALYMVDWPGYESCQAEGPRAYKRWVCSLPFGHVQFSEKIQRFTPFSLGFEFLPGETYYYISVPTPESSGQCLRLQVSVCCKERKSESAHPVGSPGESGTSGWRGGDTPSPLCLLLLLLLLILRLLRIL

SEQ ID NO: 5925 - protein, 207 aa, Homo sapiens
MRLLPLLRTVLWAAFLGSPLRGGSSLRHVVYWNSSNPRLLRGDAVVELGLNDYLDIVCPHYEGPGPPEGPETFALYMVDWPGYESCQAEGPRAYKRWVCSLPFGHVQFSEKIQRFTPFSLGFEFLPGETYYYISVPTPESSGQCLRLQVSVCCKERRARVLPRSPGGGGIPAACTGGANSDRQDGALMGEIRGSEVTLAGACPLITG

SEQ ID NO: 5926 - protein, 214 aa, Homo sapiens
MRLLPLLRTVLWAAFLGSPLRGGSSLRHVVYWNSSNPRLLRGDAVVELGLNDYLDIVCPHYEGPGPPEGPETFALYMVDWPGYESCQAEGPRAYKRWVCSLPFGHVQFSEKIQRFTPFSLGFEFLPGETYYYISVPTPESSGQCLRLQVSVCCKERRPSLSSQGARVLPRSPGGGGIPAACTGGANSDRQDGALMGEIRGSEVTLAGACPLITG

SEQ ID NO: 5927 - protein, 954 aa, Homo sapiens
MTAREHSPRHGARARAMQRASTIDVAADMLGLSLAGNIQDPDEPILEFSLACSELHTPSLDRKPNSFVAVSVTTPPQAFWTKHAQTEIIEGTNNPIFLSSIAFFQDSLINQMTQVKLSVYDVKDRSQGTMYLLGSGTFIVKDLLQDRHHRLHLTLRSAESDRVGNITVIGWQMEEKSDQRPPVTRSVDTVNGRMVLPVDESLTEALGIRSKYASLRKDTLLKSVFGGAICRMYRFPTTDGNHLRILEQMAESVLSLHVPRQFVKLLLEEDAARVCELEELGELSPCWESLRRQIVTQYQTIILTYQENLTDLHQYRGPSFKASSLKADKKLEFVPTNLHIQRMRVQDDGGSDQNYDIVTIGAPAAHCQGFKSGGLRKKLHKFEETKKHFEECCTSSGCQSIIYIPQDVVRAKEIIAQINTLKTQVSYYAERLSRAAKDRSATGLERTLAILADKTRQLVTVCDCKLLANSIHGLNAARPDYIASKASPTSTEEEQVMLRNDQDTLMARWTGRNSRSSLQVDWHEEEWEKVWLNVDKSLECIIQRVDKLLQKERLHGEGCEDVFPCAGSCTSKKDCSPPPEESSPGEWSEALYPLLTTLTDCVAMMSDKAKKAMVFLLMQDSAPTIATYLSLQYRRDVVFCQTLTALICGFIIKLRNCLHDDGFLRQLYTIGLLAQFESLLSTYGEELAMLEDMSLGIMDLRNVTFKVTQATSSASADMLPVITGNRDGFNVRVPLPGPLFDALPREIQSGMLLRVQPVLFNVGINEQQTLAERFGDTSLQEVINVESLVRLNSYFEQFKEVLPEDCLPRSRSQTCLPELLRFLGQNVHARKNKNVDILWQAAEICRRLNGVRFTSCKSAKDRTAMSVTLEQCLILQHEHGMAPQVFTQALECMRSIGTREVVTQKNLSGLVPIRDLRLDPSLLCSIPLLALSPNLLIVWLFLSIAYLVTKLRCK

SEQ ID NO: 5928 - protein, 938 aa, Homo sapiens
MTAREHSPRHGARARAMQRASTIDVAADMLGLSLAGNIQDPDEPILEFSLACSELHTPSLDRKPNSFVAVSVTTPPQAFWTKHAQTEIIEGTNNPIFLSSIAFFQDSLINQMTQVKLSVYDVKDRSQGTMYLLGSGTFIVKDLLQDRHHRLHLTLRSAESDRVGNITVIGWQMEEKSDQRPPVTRSVDTVNGRMVLPVDESLTEALGIRSKYASLRKDTLLKSVFGGAICRMYRFPTTDGNHLRILEQMAESVLSLHVPRQFVKLLLEEDAARVCELEELGELSPCWESLRRQIVTQYQTIILTYQENLTDLHQYRGPSFKASSLKADKKLEFVPTNLHIQRMRVQDDGGSDQNYDIVTIGAPAAHCQGFKSGGLRKKLHKFEETKKHFEECCTSSGCQSIIYIPQDVVRAKEIIAQINTLKTQVSYYAERLSRAAKDRSATGLERTLAILADKTRQLVTVCDCKLLANSIHGLNAARPDYIASKASPTSTEEEQVMLRNDQDTLMARWTGRNSRSSLQVDWHEEEWEKVWLNVDKSLECIIQRVDKLLQKERLHGEGCEDVFPCAGSCTSKKDCSPPPEESSPGEWSEALYPLLTTLTDCVAMMSDKAKKAMVFLLMQDSAPTIATYLSLQYRRDVVFCQTLTALICGFIIKLRNCLHDDGFLRQLYTIGLLAQFESLLSTYGEELAMLEDMSLGIMDLRNVTFKVTQATSSASADMLPVITGNRDGFNVRVPLPGPLFDALPREIQSGMLLRVQPVLFNVGINEQQTLAERFGDTSLQEVINVESLVRLNSYFEQFKEVLPEDCLPRSRSQTCLPELLRFLGQNVHARKNKNVDILWQAAEICRRLNGVRFTSCKSAKDRTAMSVTLEQCLILQHEHGMAPQVFTQALECMRSEGCRRENTMKNVGSRKYAFNSLQLKAFPKHYRPPEGTYGKVET

SEQ ID NO: 5929 - protein, 1115 aa, Homo sapiens
MRKFNIRKVLDGLTAGSSSASQQQQQQHPPGNREPEIQETLQSEHFQLCKTVRHGFPYQPSALAFDPVQKILAVGTQTGALRLFGRPGVECYCQHDSGAAVIQLQFLINEGALVSALADDTLHLWNLRQKRPAILHSLKFCRERVTFCHLPFQSKWLYVGTERGNIHIVNVESFTLSGYVIMWNKAIELSSKSHPGPVVHISDNPMDEGKLLIGFESGTVVLWDLKSKKADYRYTYDEAIHSVAWHHEGKQFICSHSDGTLTIWNVRSPAKPVQTITPHGKQLKDGKKPEPCKPILKVEFKTTRSGEPFIILSGGLSYDTVGRRPCLTVMHGKSTAVLEMDYSIVDFLTLCETPYPNDFQEPYAVVVLLEKDLVLIDLAQNGYPIFENPYPLSIHESPVTCCEYFADCPVDLIPALYSVGARQKRQGYSKKEWPISGGNWGLGAQSYPEIIITGHADGSVKFWDASAITLQVLYKLKTSKVFEKSRNKDDRPNTDIVDEDPYAIQIISWCPESRMLCIAGVSAHVIIYRFSKQEVITEVIPMLEVRLLYEINDVETPEGEQPPPLPTPVGGSNPQPIPPQSHPSTSSSSSDGLRDNVPCLKVKNSPLKQSPGYQTELVIQLVWVGGEPPQQITSLAVNSSYGLVVFGNCNGIAMVDYLQKAVLLNLGTIELYGSNDPYRREPRSPRKSRQPSGAGLCDISEGTVVPEDRCKSPTSAKMSRKLSLPTDLKPDLDVKDNSFSRSRSSSVTSIDKESREAISALHFCETFTRKTDSSPSPCLWVGTTLGTVLVIALNLPPGGEQRLLQPVIVSPSGTILRLKGAILRMAFLDTTGCLIPPAYEPWREHNVPEEKDEKEKLKKRRPVSVSPSSSQEISENQYAVICSEKQAKVISLPTQNCAYKQNITETSFVLRGDIVALSNSICLACFCANGHIMTFSLPSLRPLLDVYYLPLTNMRIARTFCFTNNGQALYLVSPTEIQRLTYSQETCENLQEMLGELFTPVETPEAPNRGFFKGLFGGGAQSLDREELFGESSSGKASRSLAQHIPGPGGIEGVKGAASGVVGELARARLALDERGQKLGDLEERTAAMLSSAESFSKHAHEIMLKYKDKKWYQF

SEQ ID NO: 5930 - protein, 542 aa, Homo sapiens
MPRRGLILHTRTHWLLLGLALLCSLVLFMYLLECAPQTDGNASLPGVVGENYGKEYYQALLQEQEEHYQTRATSLKRQIAQLKQELQEMSEKMRSLQERRNVGANGIGYQSNKEQAPSDLLEFLHSQIDKAEVSIGAKLPSEYGVIPFESFTLMKVFQLEMGLTRHPEEKPVRKDKRDELVEVIEAGLEVINNPDEDDEQEDEEGPLGEKLIFNENDFVEGYYRTERDKGTQYELFFKKADLTEYRHVTLFRPFGPLMKVKSEMIDITRSIINIIVPLAERTEAFVQFMQNFRDVCIHQDKKIHLTVVYFGKEGLSKVKSILESVTSESNFHNYTLVSLNEEFNRGRGLNVGARAWDKGEVLMFFCDVDIYFSAEFLNSCRLNAEPGKKVFYPVVFSLYNPAIVYANQEVPPPVEQQLVHKKDSGFWRDFGFGMTCQYRSDFLTIGGFDMEVKGWGGEDVHLYRKYLHGDLIVIRTPVPGLFHLWHEKRCADELTPEQYRMCIQSKAMNEASHSHLGMLVFREEIETHLHKQAYRTNSEAVG

SEQ ID NO: 5931 - protein, 2817 aa, Homo sapiens
MKLNPQQAPLYGDCVVTVLLAEEDKAEDDVVFYLVFLGSTLRHCTSTRKVSSDTLETIAPGHDCCETVKVQLCASKEGLPVFVVAEEDFHFVQDEAYDAAQFLATSAGNQQALNFTRFLDQSGPPSGDVNSLDKKLVLAFRHLKLPTEWNVLGTDQSLHDAGPRETLMHFAVRLGLLRLTWFLLQKPGGRGALSIHNQEGATPVSLALERGYHKLHQLLTEENAGEPDSWSSLSYEIPYGDCSVRHHRELDIYTLTSESDSHHEHPFPGDGCTGPIFKLMNIQQQLMKTNLKQMDSLMPLMMTAQDPSSAPETDGQFLPCAPEPTDPQRLSSSEETESTQCCPGSPVAQTESPCDLSSIVEEENTDRSCRKKNKGVERKGEEVEPAPIVDSGTVSDQDSCLQSLPDCGVKGTEGLSSCGNRNEETGTKSSGMPTDQESLSSGDAVLQRDLVMEPGTAQYSSGGELGGISTTNVSTPDTAGEMEHGLMNPDATVWKNVLQGGESTKERFENSNIGTAGASDVHVTSKPVDKISVPNCAPAASSLDGNKPAESSLAFSNEETSTEKTAETETSRSREESADAPVDQNSVVIPAAAKDKISDGLEPYTLLAAGIGEAMSPSDLALLGLEEDVMPHQNSETNSSHAQSQKGKSSPICSTTGDDKLCADSACQQNTVTSSGDLVAKLCDNIVSESESTTARQPSSQDPPDASHCEDPQAHTVTSDPVRDTQERADFCPFKVVDNKGQRKDVKLDKPLTNMLEVVSHPHPVVPKMEKELVPDQAVISDSTFSLANSPGSESVTKDDALSFVPSQKEKGTATPELHTATDYRDGPDGNSNEPDTRPLEDRAVGLSTSSTAAELQHGMGNTSLTGLGGEHEGPAPPAIPEALNIKGNTDSSLQSVGKATLALDSVLTEEGKLLVVSESSAAQEQDKDKAVTCSSIKENALSSGTLQEEQRTPPPGQDTQQFHEKSISADCAKDKALQLSNSPGASSAFLKAETEHNKEVAPQVSLLTQGGAAQSLVPPGASLATESRQEALGAEHNSSALLPCLLPDGSDGSDALNCSQPSPLDVGVKNTQSQGKTSACEVSGDVTVDVTGVNALQGMAEPRRENISHNTQDILIPNVLLSQEKNAVLGLPVALQDKAVTDPQGVGTPEMIPLDWEKGKLEGADHSCTMGDAEEAQIDDEAHPVLLQPVAKELPTDMELSAHDDGAPAGVREVMRAPPSGRERSTPSLPCMVSAQDAPLPKGADLIEEAASRIVDAVIEQVKAAGALLTEGEACHMSLSSPELGPLTKGLESAFTEKVSTFPPGESLPMGSTPEEATGSLAGCFAGREEPEKIILPVQGPEPAAEMPDVKAEDEVDFRASSISEEVAVGSIAATLKMKQGPMTQAINRENWCTIEPCPDAASLLASKQSPECENFLDVGLGRECTSKQGVLKRESGSDSDLFHSPSDDMDSIIFPKPEEEHLACDITGSSSSTDDTASLDRHSSHGSDVSLSQILKPNRSRDRQSLDGFYSHGMGAEGRESESEPADPGDVEEEEMDSITEVPANCSVLRSSMRSLSPFRRHSWGPGKNAASDAEMNHRSMSWCPSGVQYSAGLSADFNYRSFSLEGLTGGAGVGNKPSSSLEVSSANAEELRHPFSGEERVDSLVSLSEEDLESDQREHRMFDQQICHRSKQQGFNYCTSAISSPLTKSISLMTISHPGLDNSRPFHSTFHNTSANLTESITEENYNFLPHSPSKKDSEWKSGTKVSRTFSYIKNKMSSSKKSKEKEKEKDKIKEKEKDSKDKEKDKKTVNGHTFSSIPVVGPISCSQCMKPFTNKDAYTCANCSAFVHKGCRESLASCAKVKMKQPKGSLQAHDTSSLPTVIMRNKPSQPKERPRSAVLLVDETATTPIFANRRSQQSVSLSKSVSIQNITGVGNDENMSNTWKFLSHSTDSLNKISKVNESTESLTDEGVGTDMNEGQLLGDFEIESKQLEAESWSRIIDSKFLKQQKKDVVKRQEVIYELMQTEFHHVRTLKIMSGVYSQGMMADLLFEQQMVEKLFPCLDELISIHSQFFQRILERKKESLVDKSEKNFLIKRIGDVLVNQFSGENAERLKKTYGKFCGQHNQSVNYFKDLYAKDKRFQAFVKKKMSSSVVRRLGIPECILLVTQRITKYPVLFQRILQCTKDNEVEQEDLAQSLSLVKDVIGAVDSKVASYEKKVRLNEIYTKTDSKSIMRMKSGQMFAKEDLKRKKLVRDGSVFLKNAAGRLKEVQAVLLTDILVFLQEKDQKYIFASLDQKSTVISLKKLIVREVAHEEKGLFLISMGMTDPEMVEVHASSKEERNSWIQIIQDTINTLNRDEDEGIPSENEEEKKMLDTRARELKEQLHQKDQKILLLLEEKEMIFRDMAECSTPLPEDCSPTHSPRVLFRSNTEEALKGGPLMKSAINEVEILQGLVSGNLGGTLGPTVSSPIEQDVVGPVSLPRRAETFGGFDSHQMNASKGGEKEEGDDGQDLRRTESDSGLKKGGNANLVFMLKRNSEQVVQSVVHLYELLSALQGVVLQQDSYIEDQKLVLSERALTRSLSRPSSLIEQEKQRSLEKQRQDLANLQKQQAQYLEEKRRREREWEARERELREREALLAQREEEVQQGQQDLEKEREELQQKKGTYQYDLERLRAAQKQLEREQEQLRREAERLSQRQTERDLCQVSHPHTKLMRIPSFFPSPEEPPSPSAPSIAKSGSLDSELSVSPKRNSISRTHKDKGPFHILSSTSQTNKGPEGQSQAPASTSASTRLFGLTKPKEKKEKKKKNKTSRSQPGDGPASEVSAEGEEIFC

SEQ ID NO: 5932 - protein, 2813 aa, Homo sapiens
MKLNPQQAPLYGDCVVTVLLAEEDKAEDDVVFYLVFLGSTLRHCTSTRKVSSDTLETIAPGHDCCETVKVQLCASKEGLPVFVVAEEDFHFVQDEAYDAAQFLATSAGNQQALNFTRFLDQSGPPSGDVNSLDKKLVLAFRHLKLPTEWNVLGTDQSLHDAGPRETLMHFAVRLGLLRLTWFLLQKPGGRGALSIHNQEGATPVSLALERGYHKLHQLLTEENAGEPDSWSSLSYEIPYGDCSVRHHRELDIYTLTSESDSHHEHPFPGDGCTGPIFKLMNIQQQLMKTNLKQMDSLMPLMMTAQDPSSAPETDGQFLPCAPEPTDPQRLSSSEETESTQCCPGSPVAQTESPCDLSSIVEEENTDRSCRKKNKGVERKGEEVEPAPIVDSGTVSDQDSCLQSLPDCGVKGTEGLSSCGNRNEETGTKSSGMPTDQESLSSGDAVLQRDLVMEPGTAQYSSGGELGGISTTNVSTPDTAGEMEHGLMNPDATVWKNVLQGGESTKERFENSNIGTAGASDVHVTSKPVDKISVPNCAPAASSLDGNKPAESSLAFSNEETSTEKTAETETSRSREESADAPVDQNSVVIPAAAKDKISDGLEPYTLLAAGIGEAMSPSDLALLGLEEDVMPHQNSETNSSHAQSQKGKSSPICSTTGDDKLCADSACQQNTVTSSGDLVAKLCDNIVSESESTTARQPSSQDPPDASHCEDPQAHTVTSDPVRDTQERADFCPFKVVDNKGQRKDVKLDKPLTNMLEVVSHPHPVVPKMEKELVPDQAVISDSTFSLANSPGSESVTKDDALSFVPSQKEKGTATPELHTATDYRDGPDGNSNEPDTRPLEDRAVGLSTSSTAAELQHGMGNTSLTGLGGEHEGPAPPAIPEALNIKGNTDSSLQSVGKATLALDSVLTEEGKLLVVSESSAAQEQDKDKAVTCSSIKENALSSGTLQEEQRTPPPGQDTQQFHEKSISADCAKDKALQLSNSPGASSAFLKAETEHNKEVAPQVSLLTQGGAAQSLVPPGASLATESRQEALGAEHNSSALLPCLLPDGSDGSDALNCSQPSPLDVGVKNTQSQGKTSACEVSGDVTVDVTGVNALQGMAEPRRENISHNTQDILIPNVLLSQEKNAVLGLPVALQDKAVTDPQGVGTPEMIPLDWEKGKLEGADHSCTMGDAEEAQIDDEAHPVLLQPVAKELPTDMELSAHDDGAPAGVREVMRAPPSGRERSTPSLPCMVSAQDAPLPKGADLIEEAASRIVDAVIEQVKAAGALLTEGEACHMSLSSPELGPLTKGLESAFTEKVSTFPPGESLPMGSTPEEATGSLAGCFAGREEPEKIILPVQGPEPAAEMPDVKAEDEVDFRASSISEEVAVGSIAATLKMKQGPMTQAINRENWCTIEPCPDAASLLASKQSPECENFLDVGLGRECTSKQGVLKRESGSDSDLFHSPSDDMDSIIFPKPEEEHLACDITGSSSSTDDTASLDRHSSHGSDVSLSQILKPNRSRDRQSLDGFYSHGMGAEGRESESEPADPGDVEEEEMDSITEVPANCSVLRSSMRSLSPFRRHSWGPGKNAASDAEMNHRSSMRVLGDVVRRPPIHRRSFSLEGLTGGAGVGNKPSSSLEVSSANAEELRHPFSGEERVDSLVSLSEEDLESDQREHRMFDQQICHRSKQQGFNYCTSAISSPLTKSISLMTISHPGLDNSRPFHSTFHNTSANLTESITEENYNFLPHSPSKKDSEWKSGTKVSRTFSYIKNKMSSSKKSKEKEKEKDKIKEKEKDSKDKEKDKKTVNGHTFSSIPVVGPISCSQCMKPFTNKDAYTCANCSAFVHKGCRESLASCAKVKMKQPKGSLQAHDTSSLPTVIMRNKPSQPKERPRSAVLLVDETATTPIFANRRSQQSVSLSKSVSIQNITGVGNDENMSNTWKFLSHSTDSLNKISKVNESTESLTDEGVGTDMNEGQLLGDFEIESKQLEAESWSRIIDSKFLKQQKKDVVKRQEVIYELMQTEFHHVRTLKIMSGVYSQGMMADLLFEQQMVEKLFPCLDELISIHSQFFQRILERKKESLVDKSEKNFLIKRIGDVLVNQFSGENAERLKKTYGKFCGQHNQSVNYFKDLYAKDKRFQAFVKKKMSSSVVRRLGIPECILLVTQRITKYPVLFQRILQCTKDNEVEQEDLAQSLSLVKDVIGAVDSKVASYEKKVRLNEIYTKTDSKSIMRMKSGQMFAKEDLKRKKLVRDGSVFLKNAAGRLKEVQAVLLTDILVFLQEKDQKYIFASLDQKSTVISLKKLIVREVAHEEKGLFLISMGMTDPEMVEVHASSKEERNSWIQIIQDTINTLNRDEDEGIPSENEEEKKMLDTRARELKEQLHQKDQKILLLLEEKEMIFRDMAECSTPLPEDCSPTHSPRVLFRSNTEEALKGGPLMKSAINEVEILQGLVSGNLGGTLGPTVSSPIEQDVVGPVSLPRRAETFGGFDSHQMNASKGGEKEEGDDGQDLRRTESDSGLKKGGNANLVFMLKRNSEQVVQSVVHLYELLSALQGVVLQQDSYIEDQKLVLSERALTRSLSRPSSLIEQEKQRSLEKQRQDLANLQKQQAQYLEEKRRREREWEARERELREREALLAQREEEVQQGQQDLEKEREELQQKKGTYQYDLERLRAAQKQLEREQEQLRREAERLSQRQTERDLCQVSHPHTKLMRIPSFFPSPEEPPSPSAPSIAKSGSLDSELSVSPKRNSISRTHKDKGPFHILSSTSQTNKGPEGQSQAPASTSASTRLFGLTKPKEKKEKKKKNKTSRSQPGDGPASEVSAEGEEIFC

SEQ ID NO: 5933 - protein, 1058 aa, Homo sapiens
MSSSKKSKEKEKEKDKIKEKEKDSKDKEKDKKTVNGHTFSSIPVVGPISCSQCMKPFTNKDAYTCANCSAFVHKGCRESLASCAKVKMKQPKGSLQAHDTSSLPTVIMRNKPSQPKERPRSAVLLVDETATTPIFANRRSQQSVSLSKSVSIQNITGVGNDENMSNTWKFLSHSTDSLNKISKVNESTESLTDEGVGTDMNEGQLLGDFEIESKQLEAESWSRIIDSKFLKQQKKDVVKRQEVIYELMQTEFHHVRTLKIMSGVYSQGMMADLLFEQQMVEKLFPCLDELISIHSQFFQRILERKKESLVDKSEKNFLIKRIGDVLVNQFSGENAERLKKTYGKFCGQHNQSVNYFKDLYAKDKRFQAFVKKKMSSSVVRRLGIPECILLVTQRITKYPVLFQRILQCTKDNEVEQEDLAQSLSLVKDVIGAVDSKVASYEKKVRLNEIYTKTDSKSIMRMKSGQMFAKEDLKRKKLVRDGSVFLKNAAGRLKEVQAVLLTDILVFLQEKDQKYIFASLDQKSTVISLKKLIVREVAHEEKGLFLISMGMTDPEMVEVHASSKEERNSWIQIIQDTINTLNRDEDEGIPSENEEEKKMLDTRARELKEQLHQKDQKILLLLEEKEMIFRDMAECSTPLPEDCSPTHSPRVLFRSNTEEALKGGPLMKSAINEVEILQGLVSGNLGGTLGPTVSSPIEQDVVGPVSLPRRAETFGGFDSHQMNASKGGEKEEGDDGQDLRRTESDSGLKKGGNANLVFMLKRNSEQVVQSVVHLYELLSALQGVVLQQDSYIEDQKLVLSERALTRSLSRPSSLIEQEKQRSLEKQRQDLANLQKQQAQYLEEKRRREREWEARERELREREALLAQREEEVQQGQQDLEKEREELQQKKGTYQYDLERLRAAQKQLEREQEQLRREAERLSQRQTERDLCQVSHPHTKLMRIPSFFPSPEEPPSPSAPSIAKSGSLDSELSVSPKRNSISRTHKDKGPFHILSSTSQTNKGPEGQSQAPASTSASTRLFGLTKPKEKKEKKKKNKTSRSQPGDGPASEVSAEGEEIFC

SEQ ID NO: 5934 - protein, 855 aa, Homo sapiens [sequence omitted]

SEQ ID NO: 5935 - protein, 515 aa, Homo sapiens
MEAREPGGPTPTYHLVPNTSQSQVEEDVSSPPQRSSETMQLKKEISLLNGVSLVVGNMIGSGIFVSPKGVLVHTASYGMSLIVWAIGGLFSVVGALCYAELGTTITKSGASYAYILEAFGGFIAFIRLWVSLLVVEPTGQAIIAITFANYIIQPSFPSCDPPYLACRLLAAACICLLTFVNCAYVKWGTRVQDTFTYAKVVALIAIIVMGLVKLCQGHSEHFQDAFEGSSWDMGNLSLALYSALFSYSGWDTLNFVTEEIKNPERNLPLAIGISMPIVTLIYILTNVAYYTVLNISDVLSSDAVAVTFADQTFGMFSWTIPIAVALSCFGGLNASIFASSRLFFVGSREGHLPDLLSMIHIERFTPIPALLFNCTMALIYLIVEDVFRLINYFSFSYWFFVGLSVVGQLYLRWKEPKRPRPLKLSVFFPIVFCICSVFLVIVPLFTDTINSLIGIGIALSGVPFYFMGVYLPESRRPLFIRNVLAAITRGTQQLCFCVLTELDVAEEKKDERKTD

SEQ ID NO: 5936 - protein, 504 aa, Homo sapiens
MAQLRIKHQEELTELHKKRGELAQLVIDLNNQMQRKDREMQMNEAKIAECLQTISDLETECLDLRTKLCDLERANQTLKDEYDALQITFTALEGKLRKTTEENQELVTRWMAEKAQEANRLNAENEKDSRRRQARLQKELAEAAKEPLPVEQDDDIEVIVDETSDHTEETSPVRAISRAATRRSVSSFPVPQDNVDTHPGSGKEVRVPATALCVFDAHDGEVNAVQFSPGSRLLATGGMDRRVKLWEVFGEKCEFKGSLSGSNAGITSIEFDSAGSYLLAASNDFASRIWTVDDYRLRHTLTGHSGKVLSAKFLLDNARIVSGSHDRTLKLWDLRSKVCIKTVFAGSSCNDIVCTEQCVMSGHFDKKIRFWDIRSESIVREMELLGKITALDLNPERTELLSCSRDDLLKVIDLRTNAIKQTFSAPGFKCGSDWTRVVFSPDGSYVAAGSAEGSLYIWSVLTGKVEKVLSKQHSSSINAVAWSPSGSHVVSVDKGCKAVLWAQY

SEQ ID NO: 5937 - protein, 523 aa, Homo sapiens
MAQLRIKHQEELTELHKKRGELAQLVIDLNNQMQRKDREMQMNEAKIAECLQTISDLETECLDLRTKLCDLERANQTLKDEYDALQITFTALEGKLRKTTEENQELVTRWMAEKAQEANRLNAENEKDSRRRQARLQKELAEAAKEPLPVEQDDDIEVIVDETSDHTEETSPVRAISRAATKRLSQPAGGLLDSITNIFGRRSVSSFPVPQDNVDTHPGSGKEVRVPATALCVFDAHDGEVNAVQFSPGSRLLATGGMDRRVKLWEVFGEKCEFKGSLSGSNAGITSIEFDSAGSYLLAASNDFASRIWTVDDYRLRHTLTGHSGKVLSAKFLLDNARIVSGSHDRTLKLWDLRSKVCIKTVFAGSSCNDIVCTEQCVMSGHFDKKIRFWDIRSESIVREMELLGKITALDLNPERTELLSCSRDDLLKVIDLRTNAIKQTFSAPGFKCGSDWTRVVFSPDGSYVAAGSAEGSLYIWSVLTGKVEKVLSKQHSSSINAVAWSPSGSHVVSVDKGCKAVLWAQY

SEQ ID NO: 5938 - protein, 266 aa, Homo sapiens
MDRRVKLWEVFGEKCEFKGSLSGSNAGITSIEFDSAGSYLLAASNDFASRIWTVDDYRLRHTLTGHSGKVLSAKFLLDNARIVSGSHDRTLKLWDLRSKVCIKTVFAGSSCNDIVCTEQCVMSGHFDKKIRFWDIRSESIVREMELLGKITALDLNPERTELLSCSRDDLLKVIDLRTNAIKQTFSAPGFKCGSDWTRVVFSPDGSYVAAGSAEGSLYIWSVLTGKVEKVLSKQHSSSINAVAWSPSGSHVVSVDKGCKAVLWAQY

SEQ ID NO: 5939 - protein, 483 aa, Homo sapiens
MAGFAELGLSSWLVEQCRQLGLKQPTPVQLGCIPAILEGRDCLGCAKTGSGKTAAFVLPILQKLSEDPYGIFCLVLTPTRELAYQIAEQFRVLGKPLGLKDCIIVGGMDMVAQALELSRKPHVVIATPGRLADHLRSSNTFSIKKIRFLVMDEADRLLEQGCTDFTVDLEAILAAVPARRQTLLFSATLTDTLRELQGLATNQPFFWEAQAPVSTVEQLDQRYLLVPEKVKDAYLVHLIQRFQDEHEDWSIIIFTNTCKTCQILCMMLRKFSFPTVALHSMMKQKERFAALAKFKSSIYRILIATDVASRGLDIPTVQVVINHNTPGLPKIYIHRVGRTARAGRQGQAITLVTQYDIHLVHAIEEQIKKKLEEFSVEEAEVLQILTQVNVVRRECEIKLEAAHFDEKKEINKRKQLILEGKDPDLEAKRKAELAKIKQKNRRFKEKVEETLKRQKAGRAGHKGRPPRTPSGSHSGPVPSQGLV

SEQ ID NO: 5940 - protein, 51 aa, Homo sapiens
MFRIEGLAPKLDPEEMKRKMREDVISSIRNFLIYVALLRVTPFILKKLDSI

SEQ ID NO: 5941 - protein, 659 aa, Homo sapiens
MRVNHTVSTMLPTCMVHRQTMSCSGAGGITAFVAFRDVAVYFTQEEWRLLSPAQRTLHREVMLETYNHLVSLEIPSSKPKLIAQLERGEAPWREERKCPLDLCPESKPEIQLSPSCPLIFSSQQALSQHVWLSHLSQLFSSLWAGNPLHLGKHYPEDQKQQQDPFCFSGKAEWIQEGEDSRLLFGRVSKNGTSKALSSPPEEQQPAQSKEDNTVVDIGSSPERRADLEETDKVLHGLEVSGFGEIKYEEFGPGFIKESNLLSLQKTQTGETPYMYTEWGDSFGSMSVLIKNPRTHSGGKPYVCRECGRGFTWKSNLITHQRTHSGEKPYVCKDCGRGFTWKSNLFTHQRTHSGLKPYVCKECGQSFSLKSNLITHQRAHTGEKPYVCRECGRGFRQHSHLVRHKRTHSGEKPYICRECEQGFSQKSHLIRHLRTHTGEKPYVCTECGRHFSWKSNLKTHQRTHSGVKPYVCLECGQCFSLKSNLNKHQRSHTGEKPFVCTECGRGFTRKSTLSTHQRTHSGEKPFVCAECGRGFNDKSTLISHQRTHSGEKPFMCRECGRRFRQKPNLFRHKRAHSGAFVCRECGQGFCAKLTLIKHQRAHAGGKPHVCRECGQGFSRQSHLIRHQRTHSGEKPYICRKCGRGFSRKSNLIRHQRTHSG

SEQ ID NO: 5942 - protein, 539 aa, Homo sapiens
MAAPASRQVRRRARAAPRPRSAEDWWWDRLAPRGSGYHLLQSDSMLLVLSEPGPARPRAQRRASRRTPRQPPRGPSAAAKPKAGLRSEAAAAPAPAPAPTPTPEEGPDAGWGDRIPLEILVQIFGLLVAADGPMPFLGRAARVCRRWQEAASQPALWHTVTLSSPLVGRPAKGGVKAEKKLLASLEWLMPNRFSQLQRLTLIHWKSQVHPVLKLVGECCPRLTFLKLSGCHGVTADALVMLAKACCQLHSLDLQHSMVESTAVVSFLEEAGSRMRKLWLTYSSQTTAILGALLGSCCPQLQVLEVSTGINRNSIPLQLPVEALQKGCPQLQVLRLLNLMWLPKPPGRGVAPGPGFPSLEELCLASSTCNFVSNEVLGRLLHGSPNLRLLDLRGCARITPAGLQDLPCRELEQLHLGLYGTSDRLTLAKEGSPFLTQKWCHTLRELDLSGQGFSEKDLEQALAAFLSTPGGSHPALCSLNLRGTRVTPSTVSSVISSCPGLLYLNLESCRCLPRGLKRAYRGLEEVQWCLEQLLTSPSPS

SEQ ID NO: 5943 - protein, 533 aa, Homo sapiens
MAAPASRQVRRRARAAPRPRSAEDWWWDRLAPRGSGYHLLQSDSMLLVLSEPGPARPRAQRRASRRTPRQPPRGPSAAAKPKAGLRSEAAAAPAPAPAPTPTPEEGPDAGWGDRIPLEILVQIFGLLVAADGPMPFLGRAARVCRRWQEAASQPALWHTVTLSSPLVGRPAKGGVKAEKKLLASLEWLMPNRFSQLQRLTLIHWKSQLVGECCPRLTFLKLSGCHGVTADALVMLAKACCQLHSLDLQHSMVESTAVVSFLEEAGSRMRKLWLTYSSQTTAILGALLGSCCPQLQVLEVSTGINRNSIPLQLPVEALQKGCPQLQVLRLLNLMWLPKPPGRGVAPGPGFPSLEELCLASSTCNFVSNEVLGRLLHGSPNLRLLDLRGCARITPAGLQDLPCRELEQLHLGLYGTSDRLTLAKEGSPFLTQKWCHTLRELDLSGQGFSEKDLEQALAAFLSTPGGSHPALCSLNLRGTRVTPSTVSSVISSCPGLLYLNLESCRCLPRGLKRAYRGLEEVQWCLEQLLTSPSPS

SEQ ID NO: 5944 - protein, 404 aa, Homo sapiens
MAAGTAVGAWVLVLSLWGAVVGAQNITARIGEPLVLKCKGAPKKPPQRLEWKLNTGRTEAWKVLSPQGGGPWDSVARVLPNGSLFLPAVGIQDEGIFRCQAMNRNGKETKSNYRVRVYQIPGKPEIVDSASELTAGVPNKVGTCVSEGSYPAGTLSWHLDGKPLVPNEKGVSVKEQTRRHPETGLFTLQSELMVTPARGGDPRPTFSCSFSPGLPRHRALRTAPIQPRVWEPVPLEEVQLVVEPEGGAVAPGGTVTLTCEVPAQPSPQIHWMKDGVPLPLPPSPVLILPEIGPQDQGTYSCVATHSSHGPQESRAVSISIIEPGEEGPTAGSVGGSGLGTLALALGILGGLGTAALLIGVILWQRRQRRGEERKAPENQEEEEERAELNQSEEPEAGESSTGGP

SEQ ID NO: 5945 - protein, 342 aa, Homo sapiens
MAAGTAVGAWVLVLSLWGAVVGAQNITARIGEPLVLKCKGAPKKPPQRLEWKLGGGPWDSVARVLPNGSLFLPAVGIQDEGIFRCQAMNRNGKETKSNYRVRVYQIPGKPEIVDSASELTAGVPNKVGTCVSEGSYPAGTLSWHLDGKPLVPNEKGVSVKEQTRRHPETGLFTLQSELMVTPARGGDPRPTFSCSFSPGLPRHRALRTAPIQPRVWEPVPLEEVQLVVEPEGGAVAPGGTVTLTCEVPAQPSPQIHWMKDVSDLERGAGRTRRGGANCRLCGRIRAGNSSPGPGDPGRPGDSRPAHWGHLVAKAATPRRGEEGPRKPGGRGGACRTESVGGT

SEQ ID NO: 5946 - protein, 265 aa, Homo sapiens
MAAAVPKRMRGPAQAKLLPGSAIQALVGLARPLVLALLLVSAALSSVVSRTDSPSPTVLNSHISTPNVNALTHENQTKPSISQISTTLPPTTSTKKSGGASVVPHPSPTPLSQEEADNNEDPSIEEEDLLMLNSSPSTAKDTLDNGDYGEPDYDWTTGPRDDDESDDTLEENRGYMEIEQSVKSFKMPSSNIEEEDSHFFFHLIIFAFCIAVVYITYHNKRKIFLLVQSRKWRDGLCSKTVEYHRLDQNVNEAMPSLKITNDYIF

SEQ ID NO: 5947 - protein, 166 aa, Homo sapiens
MAQRLLLRRFLASVISRKPSQGQWPPLTSRALQTPQCSPGGLTVTPNPARTIYTTRISLTTFNIQDGPDFQDRVVNSETPVVVDFHAQWCGPCKILGPRLEKMVAKQHGKVVMAKVDIDDHTDLAIEYEVSAVPTVLAMKNGDVVDKFVGIKDEDQLEAFLKKLIG

SEQ ID NO: 5948 - protein, 361 aa, Homo sapiens
MASLLAKDAYLQSLAKKICSHSAPEQQARTRAGKTQGSETAGPPKKKRKKTQKKFRKREEKAAEHKAKSLGEKSPAASGARRPEAAKEEAAWASSSAGNPADGLATEPESVFALDVLRQRLHEKIQEARGQGSAKELSPAALEKRRRRKQERDRKKRKRKELRAKEKARKAEEATEAQEVVEATPEGACTEPREPPGLIFNKVEVSEDEPASKAQRRKEKRQRVKGNLTPLTGRNYRQLLERLQARQSRLDELRGQDEGKAQELEAKMKWTNLLYKAEGVKIRDDERLLQEALKRKEKRRAQRQRRWEKRTAGVVEKMQQRQDRRRQNLRRKKAARAERRLLRARKKGRILPQDLERAGLV

SEQ ID NO: 5949 - protein, 233 aa, Homo sapiens
MEGGGGIPLETLKEESQSRHVLPASFEVNSLQKSNWGFLLTGLVGGTLVAVYAVATPFVTPALRKVCLPFVPATMKQIENVVKMLRCRRGSLVDIGSGDGRIVIAAAKKGFTAVGYELNPWLVWYSRYRAWREGVHGSAKFYISDLWKVTFSQYSNVVIFGVPQMMLQLEKKLERELEDDARVIACRFPFPHWTPDHVTGEGIDTVWAYDASTFRGREKRPCTSMHFQLPIQA

SEQ ID NO: 5950 - protein, 241 aa, Homo sapiens
MQWSKEEEAAARKKVKENSAVRVLLEEQVKYEREASKYWDTFYKIHKNKFFKDRNWLLREFPEILPVDQKPEEKARESSWDHVKTSATNRFSRMHCPTVPDEKNHYEKSSGSSEGQSKTESDFSNLDSEKHKKGPMETGLFPGSNATFRILEVGCGAGNSVFPILNTLENSPESFLYCCDFASGAVELVKSHSSYRATQCFAFVHDVCDDGLPYPFPDGILDVILLVFVLSSIHPDRTLFI

SEQ ID NO: 5951 - protein, 79 aa, Homo sapiens
MSEFWHKLGCCVVEKPQPKKKRRRIDRTMIGEPMNFVHLTHIGSGEMGAGDGLAMTGAVQEQMRSKGNRDRPWSNSRGL

SEQ ID NO: 5952 - protein, 79 aa, Homo sapiens; identical to SEQ ID NO: 5951

SEQ ID NO: 5953 - protein, 635 aa, Homo sapiens
MASSGMADSANHLPFFFGNITREEAEDYLVQGGMSDGLYLLRQSRNYLGGFALSVAHGRKAHHYTIERELNGTYAIAGGRTHASPADLCHYHSQESDGLVCLLKKPFNRPQGVQPKTGPFEDLKENLIREYVKQTWNLQGQALEQAIISQKPQLEKLIATTAHEKMPWFHGKISREESEQIVLIGSKTNGKFLIRARDNNGSYALCLLHEGKVLHYRIDKDKTGKLSIPEGKKFDTLWQLVEHYSYKADGLLRVLTVPCQKIGTQGNVNFGGRPQLPGSHPATWSAGGIISRIKSYSFPKPGHRKSSPAQGNRQESTVSFNPYEPELAPWAADKGPQREALPMDTEVYESPYADPEEIRPKEVYLDRKLLTLEDKELGSGNFGTVKKGYYQMKKVVKTVAVKILKNEANDPALKDELLAEANVMQQLDNPYIVRMIGICEAESWMLVMEMAELGPLNKYLQQNRHVKDKNIIELVHQVSMGMKYLEESNFVHRDLAARNVLLVTQHYAKISDFGLSKALRADENYYKAQTHGKWPVKWYAPECINYYKFSSKSDVWSFGVLMWEAFSYGQKPYRGMKGSEVTAMLEKGERMGCPAGCPREMYDLMNLCWTYDVENRPGFAAVELRLRNYYYDVVN

SEQ ID NO: 5954 - protein, 333 aa, Homo sapiens
MACSRPPSQCEPTSLPPGPPAGRRHLPLSRRRREMSSNKEQRSAVFVILFALITILILYSSNSANEVFHYGSLRGRSRRPVNLKKWSITDGYVPILGNKTLPSRCHQCVIVSSSSHLLGTKLGPEIERAECTIRMNDAPTTGYSADVGNKTTYRVVAHSSVFRVLRRPQEFVNRTPETVFIFWGPPSKMQKPQGSLVRVIQRAGLVFPNMEAYAVSPGRMRQFDDLFRGETGKDREKSHSWLSTGWFTMVIAVELCDHVHVYGMVPPNYCSQRPRLQRMPYHYYEPKGPDECVTYIQNEHSRKGNHHRFITEKRVFSSWAQLYGITFSHPSWT

SEQ ID NO: 5955 - protein, 684 aa, Homo sapiens
MARHRNVRGYNYDEDFEDDDLYGQSVEDDYCISPSTAAQFIYSRRDKPSVEPVEEYDYEDLKESSNSVSNHQLSGFDQARLYSCLDHMREVLGDAVPDEILIEAVLKNKFDVQKALSGVLEQDRVQSLKDKNEATVSTGKIAKGKPVDSQTSRSESEIVPKVAKMTVSGKKQTMGFEVPGVSSEENGHSFHTPQKGPPIEDAIASSDVLETASKSANPPHTIQASEEQSSTPAPVKKSGKLRQQIDVKAELEKRQGGKQLLNLVVIGHVDAGKSTLMGHMLYLLGNINKRTMHKYEQESKKAGKASFAYAWVLDETGEERERGVTMDVGMTKFETTTKVITLMDAPGHKDFIPNMITGAAQADVAVLVVDASRGEFEAGFETGGQTREHGLLVRSLGVTQLAVAVNKMDQVNWQQERFQEITGKLGHFLKQAGFKESDVGFIPTSGLSGENLITRSQSSELTKWYKGLCLLEQIDSFKPPQRSIDKPFRLCVSDVFKDQGSGFCITGKIEAGYIQTGDRLLAMPPNETCTVKGITLHDEPVDWAAAGDHVSLTLVGMDIIKINVGCIFCGPKVPIKACTRFRARILIFNIEIPITKGFPVLLHYQTVSEPAVIKRLISVLNKSTGEVTKKKPKFLTKGQNALVELQTQRPIALELYKDFKELGRFMLRYGGSTIAAGVVTEIKE

SEQ ID NO: 5956 - protein, 519 aa, Homo sapiens
MAAEREPPPLGDGKPTDFEDLEDGEDLFTSTVSTLESSPSSPEPASLPAEDISANSNGPKPTEVVLDDDREDLFAEATEEVSLDSPEREPILSSEPSPAVTPVTPTTLIAPRIESKSMSAPVIFDRSREEIEEEANGDIFDIEIGVSDPEKVGDGMNAYMAYRVTTKTSLSMFSKSEFSVKRRFSDFLGLHSKLASKYLHVGYIVPPAPEKSIVGMTKVKVGKEDSSSTEFVEKRRAALERYLQRTVKHPTLLQDPDLRQFLESSELPRAVNTQALSGAGILRMVNKAADAVNKMTIKMNESDAWFEEKQQQFENLDQQLRKLHVSVEALVCHRKELSANTAAFAKSAAMLGNSEDHTALSRALSQLAEVEEKIDQLHQEQAFADFYMFSELLSDYIRLIAAVKGVFDHRMKCWQKWEDAQITLLKKREAEAKMMVANKPDKIQQAKNEIREWEAKVQQGERDFEQISKTIRKEVGRFEKERVKDFKTVIIKYLESLVQTQQQLIKYWEAFLPEAKAIA

SEQ ID NO: 5957 - protein, 946 aa, Homo sapiens
MAVYCYALNSLVIMNSANEMKSGGGPGPSGSETPPPPRRAVLSPGSVFSPGRGASFLFPPAESLSPEEPRSPGGWRSGRRRLNSSSGSGSGSSGSSVSSPSWAGRLRGDRQQVVAAGTLSPPGPEEAKRKLRILQRELQNVQVNQKVGMFEAHIQAQSSAIQAPRSPRLGRARSPSPCPFRSSSQPPGRVLVQGARSEERRTKSWGEQCPETSGTDSGRKGGPSLCSSQVKKGMPPLPGRAAPTGSEAQGPSAFVRMEKGIPASPRCGSPTAMEIDKRGSPTPGTRSCLAPSLGLFGASLTMATEVAARVTSTGPHRPQDLALTEPSGRARELEDLQPPEALVERQGQFLGSETSPAPERGGPRDGEPPGKMGKGYLPCGMPGSGEPEVGKRPEETTVSVQSAESSDSLSWSRLPRALASVGPEEARSGAPVGGGRWQLSDRVEGGSPTLGLLGGSPSAQPGTGNVEAGIPSGRMLEPLPCWDAAKDLKEPQCPPGDRVGVQPGNSRVWQGTMEKAGLAWTRGTGVQSEGTWESQRQDSDALPSPELLPQDQDKPFLRKACSPSNIPAVIITDMGTQEDGALEETQGSPRGNLPLRKLSSSSASSTGFSSSYEDSEEDISSDPERTLDPNSAFLHTLDQQKPRVSKSWRKIKNMVHWSPFVMSFKKKYPWIQLAGHAGSFKAAANGRILKKHCESEQRCLDRLMVDVLRPFVPAYHGDVVKDGERYNQMDDLLADFDSPCVMDCKMGIRTYLEEELTKARKKPSLRKDMYQKMIEVDPEAPTEEEKAQRAVTKPRYMQWRETISSTATLGFRIEGIKKEDGTVNRDFKKTKTREQVTEAFREFTKGNHNILIAYRDRLKAIRTTLEVSPFFKCHEVIGSSLLFIHDKKEQAKVWMIDFGKTTPLPEGQTLQHDVPWQEGNREDGYLSGLNNLVDILTEMSQDAPLA

SEQ ID NO: 5958 - protein, 259 aa, Homo sapiens
MLPSTSVNSLVQGNGVLNSRDAARHTAGAKRYKYLRRLFRFRQMDFEFAAWQMLYLFTSPQRVYRNFHYRKQTKDQWARDDPAFLVLLSIWLCVSTIGFGFVLDMGFFETIKLLLWVVLIDCVGVGLLIATLMWFISNKYLVKRQSRDYDVEWGYAFDVHLNAFYPLLVILHFIQLFFINHVILTDTFIGYLVGNTLWLVAVGYYIYVTFLGYSALPFLKNTVILLYPFAPLILLYGLSLALGWNFTHTLCSFYKYRVK

SEQ ID NO: 5959 - protein, 831 aa, Homo sapiens
MGELFRSEEMTLAQLFLQSEAAYCCVSELGELGKVQFRDLNPDVNVFQRKFVNEVRRCEEMDRKLRFVEKEIRKANIPIMDTGENPEVPFPRDMIDLEANFEKIENELKEINTNQEALKRNFLELTELKFILRKTQQFFDEMADPDLLEESSSLLEPSEMGRGTPLRLGFVAGVINRERIPTFERMLWRVCRGNVFLRQAEIENPLEDPVTGDYVHKSVFIIFFQGDQLKNRVKKICEGFRASLYPCPETPQERKEMASGVNTRIDDLQMVLNQTEDHRQRVLQAAAKNIRVWFIKVRKMKAIYHTLNLCNIDVTQKCLIAEVWCPVTDLDSIQFALRRGTEHSGSTVPSILNRMQTNQTPPTYNKTNKFTYGFQNIVDAYGIGTYREINPAPYTIITFPFLFAVMFGDFGHGILMTLFAVWMVLRESRILSQKNENEMFSTVFSGRYIILLMGVFSMYTGLIYNDCFSKSLNIFGSSWSVRPMFTYNWTEETLRGNPVLQLNPALPGVFGGPYPFGIDPIWNIATNKLTFLNSFKMKMSVILGIIHMLFGVSLSLFNHIYFKKPLNIYFGFIPEIIFMTSLFGYLVILIFYKWTAYDAHTSENAPSLLIHFINMFLFSYPESGYSMLYSGQKGIQCFLVVVALLCVPWMLLFKPLVLRRQYLRRKHLGTLNFGGIRVGNGPTEEDAEIIQHDQLSTHSEDADEFDFGDTMVHQAIHTIEYCLGCISNTASYLRLWALSLAHAQLSEVLWTMVIHIGLSVKSLAGGLVLFFFFTAFATLTVAILLIMEGLSAFLHALRLHWVEFQNKFYSGTGFKFLPFSFEHIREGKFEE

SEQ ID NO: 5960 - protein, 1359 aa, Homo sapiens
MRRNIRKLLREDQLEPVTKAAQQEELERRKRLEQQRKDYAAPIPTVPLEFLPEEIALRASDGPQLPPRVLAQEVICLDSSSGSEDEKSSRDEVIELSSGEEDTLHIVDSSESVSEDDEEEEKGGTHVNDVLNQRDALGRVFVNLNHPPEEENVFLAPQLARAVKPHQIGGIRFLYDNLVESLERFKTSSGFGCILAHSMGLGKTLQVISFIDVLFRHTPAKTVLAIVPVNTLQNWLAEFNMWLPPPEALPADNKPEEVQPRFFKVHILNDEHKTMASRAKVMADWVSEGGVLLMGYEMYRLLTLKKSFATGRPKKTKKRSHPVIIDLDEEDRQQEFRREFEKALCRPGPDVVICDEGHRIKNCQASTSQALKNIRSRRRVVLTGYPLQNNLIEYWCMVDFVRPDFLGTRQEFSNMFERPILNGQCIDSTPQDVRLMRYRSHVLHSLLEGFVQRRGHTVLKIHLPAKEENVILVRLSKIQRDLYTQFMDRFRDCGSSGWLGLNPLKAFCVCCKIWNHPDVLYEALQKESLANEQDLDVEELGSAGTSARCPPQGTKGKGEDSTLASSMGEATNSKFLQGVGFNPFQERGNNIVTYEWAKDLLTNYQTGVLENSPKMVLLFHLIEESVKLGDKILVFSQSLSTLALIEEFLGKREVPCPPGTEGQGAQKWVRNISYFRLDGSTPAFERERLINQFNDPSNLTTWLFLLSTRAGCLGVNLIGANRVVVFDASWNPCHDAQAVCRVYRYGQKKPCYIYRLVADYTLEKKIYDRQISKQGMSDRVVDDLNPMLNFTRKEVENLLHFVEKEPAPQVSLNVKGIKESVLQLACLKYPHLITKEPFEHESLLLNRKDHKLTKAEKKAAKKSYEEDKRTSVPYTRPSYAQYYPASDQSLTSIPAFSQRNWQPTLKGDEKPVASVRPVQSTPIPMMPRHVPLGGSVSSASSTNPSMNFPINYLQRAGVLVQKVVTTTDIVIPGLNSSTDVQARINAGESIHIIRGTKGTYIRTSDGRIFAVRATGKPKVPEDGRMAASGSQGPSCESTSNGRHSASSPKAPDPEGLARPVSPDSPEIISELQQYADVAAARESRQSSPSTNAALPGPPAQLMDSSAVPGTALGTEPRLGGHCLNSSLLVTGQPCGDRHPVLDLRGHKRKLATPPAAQESSRRRSRKGHLPAPVQPYEHGYPVSGGFAMPPVSLNHNLTTPFTSQAGENSLFMGSTPSYYQLSNLLADARLVFPVTTDPLVPAGPVSSSSTATSVTASNPSFMLNPSVPGILPSYSLPFSQPLLSEPRMFAPFPSPVLPSNLSRGMSIYPGYMSPHAGYPAGGLLRSQVPPFDSHEVAEVGFSSNDDEDKDDDVIEVTGK

SEQ ID NO: 5961 - protein, 513 aa, Homo sapiens
MASGSVAECLQQETTCPVCLQYFAEPMMLDCGHNICCACLARCWGTAETNVSCPQCRETFPQRHMRPNRHLANVTQLVKQLRTERPSGPGGEMGVCEKHREPLKLYCEEDQMPICVVCDRSREHRGHSVLPLEEAVEGFKEQIQNQLDHLKRVKDLKKRRRAQGEQARAELLSLTQMEREKIVWEFEQLYHSLKEHEYRLLARLEELDLAIYNSINGAITQFSCNISHLSSLIAQLEEKQQQPTRELLQDIGDTLSRAERIRIPEPWITPPDLQEKIHIFAQKCLFLTESLKQFTEKMQSDMEKIQELREAQLYSVDVTLDPDTAYPSLILSDNLRQVRYSYLQQDLPDNPERFNLFPCVLGSPCFIAGRHYWEVEVGDKAKWTIGVCEDSVCRKGGVTSAPQNGFWAVSLWYGKEYWALTSPMTALPLRTPLQRVGIFLDYDAGEVSFYNVTERCHTFTFSHATFCGPVRPYFSLSYSGGKSAAPLIICPMSGIDGFSGHVGNHGHSMETSP

SEQ ID NO: 5962 - protein, 358 aa, Homo sapiens
MASGSVAECLQQETTCPVCLQYFAEPMMLDCGHNICCACLARCWGTAETNVSCPQCRETFPQRHMRPNRHLANVTQLVKQLRTERPSGPGGEMGVCEKHREPLKLYCEEDQMPICVVCDRSREHRGHSVLPLEEAVEGFKEQIQNQLDHLKRVKDLKKRRRAQGEQARAELLSLTQMEREKIVWEFEQLYHSLKEHEYRLLARLEELDLAIYNSINGAITQFSCNISHLSSLIAQLEEKQQQPTRELLQDIGDTLSRAERIRIPEPWITPPDLQEKIHIFAQKCLFLTESLKQFTEKMQSDMEKIQELREAQLYSVDVTLDPDTAYPSLILSDNLRQVRYSYLQQDLPDNPERSPSTT

SEQ ID NO: 5963 - protein, 475 aa, Homo sapiens
MDRNPSPPPPPGRDKEEEEEVAGGDCIGSTVYSKHWLFGVLSGLIQIVSPENTKSSSDDEEQLTELDEEMENEICRVWDMSMDEDVALFLQEFNAPDIFMGVLAKSKCPRLREICVGILGNMACFQEICVSISSDKNLGQVLLHCLYDSDPPTLLETSRLLLTCLSQAEVASVWVERIQEHPAIYDSICFIMSSSTNVDLLVKVGEVVDKLFDLDEKLMLEWVRNGAAQPLDQPQEESEEQPVFRLVPCILEAAKQVRSENPEWLDVYMHILQLLTTVDDGIQAIVHCPDTGKDIWNLLFDLVCHEFCQSDDPPIILQEQKTVLASVFSVLSAIYASQTEQEYLKIEKVDLPLIDSLIRVLQNMEQCQKKPENSAESNTEETKRTDLTQDDFHLKILKDILCEFLSNIFQALTKETVAQGVKEGQLSKQKCSSAFQNLLPFYSPVVEDFIKILREVDKALADDLEKNFPSLKVQT

SEQ ID NO: 5964 - protein, 352 aa, Homo sapiens
MALTVDVAGPAPWGFRITGGRDFHTPIMVTKVAERGKAKDADLRPGDIIVAINGESAEGMLHAEAQSKIRQSPSPLRLQLDRSQATSPGQTNGDSSLEVLATRFQGSVRTYTESQSSLRSSYSSPTSLSPRAGSPFSPPPSSSSLTGEAAISRSFQSLACSPGLPAADRLSYSGRPGSRQAGLGRAGDSAVLVLPPSPGPRSSRPSMDSEGGSLLLDEDSEVFKMLQENREGRAAPRQSSSFRLLQEALEAEERGGTPAFLPSSLSPQSSLPASRALATPPKLHTCEKCSTSIANQAVRIQEGRYRHPGCYTCADCGLNLKMRGHFWVGDELYCEKHARQRYSAPATLSSRA

SEQ ID NO: 5965 - protein, 366 aa, Homo sapiens
MALTVDVAGPAPWGFRITGGRDFHTPIMVTKVAERGKAKDADLRPGDIIVAINGESAEGMLHAEAQSKIRQSPSPLRLQLDRSQATSPGQTNGDSSLEVLATRFQGSVRTYTESQSSLRSSYSSPTSLSPRAGSPFSPPPSSSSLTGEAAISRSFQSLACSPGLPAADRLSYSGRPGSRQAGLGRAGDSAVLVLPPSPGPRSSRPSMDSEGGSLLLDEDSEVFKMLQENREGRAAPRQSSSFRLLQEALEAEERGGTPAFLPSSLSPQSSLPASRALATPPKLHTCEKCSTSIANQAVRIQEGRYRHPGCYTCADCGLNLKMRGHFWEDACAMEGMRLSLEALEGMVEGAKRRDRRKTRRPIQPSW

SEQ ID NO: 5966 - protein, 278 aa, Homo sapiens
MALTVDVAGPAPWGFRITGGRDFHTPIMVTKVAERGKAKDADLRPGDIIVAINGESAEGMLHAEAQSKIRQSPSPLRLQLDRSQATSPGQTNGDSSLEVLATRFQGSVRTYTESQSSLRSSYSSPTSLSPRAGSPFSPPPSSSSLTGEAAISRSFQSLACSPGLPAADRLSYSGRPGSRQAGLGRAGDSAVLVLPPSPGPRSSRPSMDSEGGSLLLDEDSEVFKMLQENREGRAAPRQSSSFRLLQEALEAEERGTRLCASRRAGTATPAATPVPTVG

SEQ ID NO: 5967 - protein, 389 aa, Homo sapiens
MADPRDKALQDYRKKLLEHKEIDGRLKELREQLKELTKQYEKSENDLKALQSVGQIVGEVLKQLTEEKFIVKATNGPRYVVGCRRQLDKSKLKPGTRVALDMTTLTIMRYLPREVDPLVYNMSHEDPGNVSYSEIGGLSEQIRELREVIELPLTNPELFQRVGIIPPKGCLLYGPPGTGKTLLARAVASQLDCNFLKVVSSSIVDKYIGESARLIREMFNYARDHQPCIIFMDEIDAIGGRRFSEGTSADREIQRTLMELLNQMDGFDTLHRVKMIMATNRPDTLDPALLRPGRLDRKIHIDLPNEQARLDILKIHAGPITKHGEIDYEAIVKLSDGFNGADLRNVCTEAGMFAIRADHDFVVQEDFMKAVRKVADSKKLESKLDYKPV

SEQ ID NO: 5968 - protein, 358 aa, Homo sapiens
MAVKWTGGHSSPVLCLNASKEGLLASGAEGGDLTAWGEDGTPLGHTRFQGADDVTSVLFSPSCPTKLYASHGETISVLDVRSLKDSLDHFHVNEEEINCLSLNQTENLLASADDSGAIKILDLENKKVIRSLKRHSNICSSVAFRPQRPQSLVSCGLDMQVMLWSLQKARPLWITNLQEDETEEMEGPQSPGQLLNPALAHSISVASCGNIFSCGAEDGKVRIFRVMGVKCEQELGFKGHTSGVSQVCFLPESYLLLTGGNDGKITLWDANSEVEKKQKSPTKRTHRKKPKRGTCTKQGGNTNASVTDEEEHGNILPKLNIEHGEKVNWLLGTKIKGHQNILVADQTSCISVYPLNEF

SEQ ID NO: 5969 - protein, 318 aa, Homo sapiens
MATAAGSRAPPLWRDRPPSSREEHPVRPEVGRRPRKSPPGAAWSVRSPPGPDTARSWRPFSLSECCSCHCGHGRYPVPVEVHGEAAGEAGQEGGEGLQGGAGQSEEGPSAEKCRVCPCVCRERHPQEERRCELASDGVPRRRSGLQGGHSCDYEGGDQEYGPGDQSPGQGPEHHGPAEGLLSDGQVRAAGAEPGRPYIGDGGLHELGHHPDHAAGAGGQPHHADRRGEWPGGAGPAQPAARGRLCRGRELCAQPGGPAVTEVGRLEELAVPRRCAPPLPRDVLEGSCPLPTASCLCADPAGLRPAATLRLSPARPAWP

SEQ ID NO: 5970 - protein, 206 aa, Homo sapiens [sequence omitted]
